(19) United States
(12) Patent Application Publication
(10) Pub. No.: US 2022/0143063 A1
(43) Pub. Date: May 12, 2022

(54) T-CELL MODULATORY POLYPEPTIDES AND METHODS OF USE THEREOF

(71) Applicant: Cue Biopharma, Inc., Cambridge, MA (US)

(72) Inventors: Ronald D. Seidel, III, Cambridge, MA (US); Rodolfo J. Chaparro, Cambridge, MA (US); John F. Ross, Cambridge, MA (US); Saso Cemerski, Cambridge, MA (US)

(21) Appl. No.: 17/584,133

(22) Filed: Jan. 25, 2022

Related U.S. Application Data
(63) Continuation of application No. PCT/US2020/051255, filed on Sep. 17, 2020.
(60) Provisional application No. 62/903,441, filed on Sep. 20, 2019.
(60) Provisional application No. 62/990,693, filed on Mar. 17, 2020.
(60) Provisional application No. 63/048,561, filed on Jul. 6, 2020.

(51) Int. Cl. A61K 31/7088; A61P 35/00; C07K 14/74; C07K 14/55; C12N 9/14

(52) U.S. Cl. CPC A61K 31/7088; A61P 35/00; A61K 38/00; C07K 14/55; C12N 9/14; C07K 14/70539

(57) ABSTRACT

The present disclosure provides T-cell modulatory polypeptides (TMPs) that comprise an immunomodulatory polypeptide, class I HLA polypeptides (a class I HLA heavy chain polypeptide and a β2 microglobulin polypeptide), and a KRAS peptide (e.g., a KRAS peptide comprising a cancer-associated mutation) that presents an epitope to a T-cell receptor. A TMP is useful for modulating the activity of a T cell, and for modulating an immune response in an individual.

### CROSS-REFERENCE

[0001] This application claims the benefit of U.S. Provisional Patent Application No. 62/903,441, filed Sep. 20, 2019, U.S. Provisional Patent Application No. 62/990,693, filed Mar. 17, 2020, and U.S. Provisional Patent Application No. 63/048,561, filed Jul. 6, 2020, each of which applications are incorporated herein by reference in their entirety.

### INTRODUCTION

[0002] An adaptive immune response involves the engagement of the T cell receptor (TCR), present on the surface of a T cell, with a small peptide antigen non-covalently presented on the surface of an antigen presenting cell (APC) by a major histocompatibility complex (MHC; also referred to in humans as a human leukocyte antigen (HLA) complex). This engagement represents the immune system's targeting mechanism and is a requisite molecular interaction for T cell modulation (activation or inhibition) and effector function. Following epitope-specific cell targeting, the targeted T cells are activated through engagement of costimulatory proteins found on the APC with counterpart costimulatory proteins the T cells. Both signals—epitope/TCR binding and engagement of APC costimulatory proteins with T cell costimulatory proteins—are required to drive T cell specificity and activation or inhibition. The costimulatory proteins on the APC also are referred to as “immunomodulatory” proteins because they modulate the activity of the T cell when they bind the costimulatory protein on the T cell, with the specific modulation being a function of which immunomodulatory protein on the APC binds to which costimulatory protein on the T cell. The TCR is specific for a given epitope; however, the T cell's costimulatory protein is not epitope-specific and instead is generally expressed on all T cells or on large T cell subsets.

### SUMMARY

[0003] The present disclosure provides heterodimeric and single-chain T-cell modulatory polypeptides (TMPs), and dimers thereof, that comprise an immunomodulatory polypeptide, class I HLA polypeptides (a class I HLA heavy chain polypeptide and a β2 microglobulin polypeptide), and a KRAS peptide (e.g., a KRAS peptide comprising a cancer-associated mutation) that presents an epitope to a T-cell receptor. A TMP is useful for modulating the activity of a T cell, and for modulating an immune response in an individual.

### BRIEF DESCRIPTION OF THE DRAWINGS

[0004] FIGS. 1A-1F are schematic depictions of various exemplary TMPs of the present disclosure.

[0005] FIGS. 2A-2F are schematic depictions of various disulfide-linked TMPs of the present disclosure.

[0006] FIGS. 3A-3G provide amino acid sequences of immunoglobulin Fc polypeptides. The sequences are set forth in SEQ ID NO's 19-30.

[0007] FIG. 4 provides a multiple amino acid sequence alignment of beta-2 microglobulin (β2M) precursors (i.e., including the leader sequence) from Homo sapiens (NP_004039.1; SEQ ID NO:31), Pan troglodytes (NP_001009066.1; SEQ ID NO:31), Macaca mulatta (NP_001040602.1; SEQ ID NO:32), Bos taurus (NP_776318.1; SEQ ID NO:33) and Mus musculus (NP_033865.2; SEQ ID NO:34). Amino acids 1-20 are a signal peptide.

[0008] FIGS. 5A-5C provide amino acid sequences of full-length human HLA heavy chains of alleles A*0101 (SEQ ID NO: 35), A*1101 (SEQ ID NO: 36), A*2402 (SEQ ID NO: 37), and A*3303 (SEQ ID NO: 38)(FIG. 7A); full-length human HLA heavy chain of allele B*0702 (SEQ ID NO: 39) (FIG. 7B); and a full-length human HLA-C heavy chain (SEQ ID NO: 40) (FIG. 7C).

[0009] FIG. 6 provides an alignment of eleven mature MHC class I heavy chain amino acid sequences without their leader sequences, transmembrane domains, and intracellular domains. The sequences are set forth from top to bottom as follows: SEQ ID NOs: 41-51.

[0010] FIGS. 7A-7B provide an alignment of HLA-A heavy chain amino acid sequences (FIG. 7A; SEQ ID NO: 52-60, respectively) and a consensus sequence (FIG. 7B; SEQ ID NO: 61).

[0011] FIGS. 8A-8B provide an alignment of HLA-B heavy chain amino acid sequences (FIG. 8A; SEQ ID NOs: 62-68, respectively) and a consensus sequence (FIG. 8B; SEQ ID NO: 69).

[0012] FIGS. 9A-9B provide an alignment of HLA-C heavy chain amino acid sequences (FIG. 9A; SEQ ID NOs: 70-78, respectively) and a consensus sequence (FIG. 9B; SEQ ID NO: 79).

[0013] FIG. 10 provides a consensus amino acid sequence for each of HLA-E, -F, and -G heavy chains (SEQ ID NOs: 80-82, respectively). Variable amino acid (aa) positions are indicated as “X” residues sequentially numbered; the locations of amino acids 84, 139, and 236 are double underlined.

[0014] FIG. 11 provides an alignment of consensus amino acid sequences for HLA-A (SEQ ID No: 83), -B (SEQ ID NO: 84), -C (SEQ ID NO: 85), -E (SEQ ID NO: 86), -F (SEQ ID NO: 87), and -G (SEQ ID NO: 88).

[0015] FIG. 12A-12D provide schematic depictions of multiple disulfide-linked TMP of the present disclosure.

[0016] FIGS. 13A-13L provide amino acid sequences of examples of polypeptides suitable for inclusion in a TMP of the present disclosure. The sequences in FIG. 13A-13F are set forth in SEQ ID NOs: 255-260. The sequences in FIG. 13G-13L are set forth in SEQ ID NOs: 339-344.

[0017] FIGS. 14A-14JJ provide amino acid sequences of examples of polypeptides suitable for inclusion in a TMP of the present disclosure. The sequences are set forth in SEQ ID NOs: 261-296.

[0018] FIGS. 15A-15JJ provide amino acid sequences of examples of polypeptides suitable for inclusion in a TMP of the present disclosure. The sequences are set forth in SEQ ID NOs: 297-332.

[0019] FIGS. 16A-16C provide schematic depictions of examples of configurations of disulfide-linked TMPs of the present disclosure.

[0020] FIG. 17 provides schematic depictions of examples of positions of immunomodulatory polypeptides in “split chain” TMPs of the present disclosure.

[0021] FIG. 18 provides schematic depictions of examples of positions of immunomodulatory polypeptides in “single-chain” TMPs of the present disclosure.

[0022] FIGS. 19A-19P provide amino acid sequences of some examples of single-chain TMPs of the present disclosure. The sequences are set forth in SEQ ID NOs: 333-338 and 593-602.

[0023] FIG. 20 depicts the effect of KRAS G12V (7-16) HLA-A11 TMPs on expansion of KRAS G12V (7-16)-specific CD8⁺ T cells in vitro.

[0024] FIGS. 21A-21JJ provide amino acid sequences for HLA-A heavy chain amino acid sequences and β2M amino acid sequences of TMPs of the present disclosure.

[0025] FIGS. 22A-22BB provide amino acid sequences for HLA-A heavy chain amino acid sequences of TMPs of the present disclosure.

### DEFINITIONS

[0026] The terms “polynucleotide” and “nucleic acid,” used interchangeably herein, refer to a polymeric form of nucleotides of any length, either ribonucleotides or deoxyribonucleotides. Thus, this term includes, but is not limited to, single-, double-, or multi-stranded DNA or RNA, genomic DNA, cDNA, DNA-RNA hybrids, or a polymer comprising purine and pyrimidine bases or other natural, chemically or biochemically modified, non-natural, or derivatized nucleotide bases.

[0027] The terms “peptide,” “polypeptide,” and “protein” are used interchangeably herein, and refer to a polymeric form of amino acids of any length, which can include coded and non-coded amino acids, chemically or biochemically modified or derivatized amino acids, and polypeptides having modified peptide backbones. Furthermore, as used herein, a “polypeptide” refers to a protein that includes modifications, such as deletions, additions, and substitutions (generally conservative in nature as would be known to a person in the art) to the native sequence, as long as the protein maintains the desired activity. These modifications can be deliberate, as through site-directed mutagenesis, or can be accidental, such as through mutations of hosts that produce the proteins, or errors due to polymerase chain reaction (PCR) amplification or other recombinant DNA methods. References herein to a specific residue or residue number in a known polypeptide are understood to refer to the amino acid at that position in the wild-type polypeptide. To the extent that the sequence of the wild-type polypeptide is altered, either by addition or deletion of one or more amino acids, one of ordinary skill will understand that a reference to the specific residue or residue number will be correspondingly altered so as to refer to the same specific amino acid in the altered polypeptide, which would be understood to reside at an altered position number. For example, if an MHC class I polypeptide is altered by the addition of one amino acid at the N-terminus, then a reference to position 84 or a specific residue at position 84, will be understood to indicate the amino acids that are at position 85 on the altered polypeptide. Likewise, a reference herein to substitution of a specific amino acid at a specific position, e.g., Y84, is understood to refer to a substitution of an amino acid for the amino acid at position 84 in the wild-type polypeptide. A Y84C substitution is thus understood to be a substitution of Cys residue for the Tyr residue that is present in the wild-type sequence. If, e.g., the wild-type polypeptide is altered to change the amino acid at position 84 from its wild-type amino acid to an alternate amino acid, then the substitution for the amino acid at position 84 will be understood to refer to the substitution for the alternate amino acid. If in such case the polypeptide is also altered by the addition or deletion of one or more amino acids, then the reference to the substitution will be understood to refer to the substitution for the alternate amino acid at the altered position number. A reference to a “non-naturally occurring Cys residue” in a polypeptide, e.g., an MHC class I polypeptide, means that the polypeptide comprises a Cys residue in a location where there is no Cys in the corresponding wild-type polypeptide. This can be accomplished through routine protein engineering in which a cysteine is substituted for the amino acid that occurs in the wild-type sequence.

[0028] A polynucleotide or polypeptide has a certain percent “sequence identity” to another polynucleotide or polypeptide, meaning that, when aligned, that percentage of bases or amino acids are the same, and in the same relative position, when comparing the two sequences. Sequence identity can be determined in a number of different ways. To determine sequence identity, sequences can be aligned using various convenient methods and computer programs (e.g., BLAST, T-COFFEE, MUSCLE, MAFFT, etc.), available over the world wide web at sites including ncbi.nlm.nili.gov/BLAST, ebi.ac.uk/Tools/msa/tcoffee/, ebi.ac.uk/Tools/msa/muscle/, mafft.cbrc.jp/alignment/software/. See, e.g., Altschul et al. (1990), J. Mol. Bioi. 215:403-10. Unless otherwise stated, “sequence identity” as referred to herein is determined by BLAST (Basic Local Alignment Search Tool), as described in Altschul et al. (1990) J. Mol. Biol. 215:403.

[0029] The term “conservative amino acid substitution” refers to the interchangeability in proteins of amino acid residues having similar side chains. For example, a group of amino acids having aliphatic side chains consists of glycine, alanine, valine, leucine, and isoleucine; a group of amino acids having aliphatic-hydroxyl side chains consists of serine and threonine; a group of amino acids having amide containing side chains consisting of asparagine and glutamine; a group of amino acids having aromatic side chains consists of phenylalanine, tyrosine, and tryptophan; a group of amino acids having basic side chains consists of lysine, arginine, and histidine; a group of amino acids having acidic side chains consists of glutamate and aspartate; and a group of amino acids having sulfur containing side chains consists of cysteine and methionine. Exemplary conservative amino acid substitution groups are: valine-leucine-isoleucine, phenylalanine-tyrosine, lysine-arginine, alanine-valine-glycine, and asparagine-glutamine.

[0030] The term “immunological synapse” or “immune synapse” as used herein generally refers to the natural interface between two interacting immune cells of an adaptive immune response including, e.g., the interface between an antigen-presenting cell (APC) or target cell and an effector cell, e.g., a lymphocyte, an effector T cell, a natural killer cell, and the like. An immunological synapse between an APC and a T cell is generally initiated by the interaction of a T cell antigen receptor and major histocompatibility complex molecules, e.g., as described in Bromley et al., Annu Rev Immunol. 2001; 19:375-96; the disclosure of which is incorporated herein by reference in its entirety.

[0031] “T cell” includes all types of immune cells expressing CD3, including T-helper cells (CD4⁺ cells), cytotoxic T-cells (CD8⁺ cells), T-regulatory cells (Treg), and NK-T cells.

[0032] The term “immunomodulatory polypeptide” (also referred to herein as a “MOD”), as used herein, means a polypeptide that specifically binds a cognate costimulatory polypeptide on a T cell, thereby providing a signal which, in addition to the primary signal provided by, for instance, binding of a TCR/CD3 complex with a major histocompatibility complex (MHC) polypeptide loaded with peptide, mediates a T cell response, including, but not limited to, proliferation, activation, differentiation, and the like. As discussed herein, an immunomodulatory polypeptide can include, but is not limited to wild-type or variants of wild-type polypeptides such as a cytokine (e.g., IL-2), CD7, B7-1 (CD80), B7-2 (CD86), PD-L1, PD-L2, 4-1BBL, OX40L, Fas ligand (FasL), inducible costimulatory ligand (ICOS-L), intercellular adhesion molecule (ICAM), CD30L, CD40, CD70, CD83, HLA-G, MICA, MICB, HVEM, lymphotoxin beta receptor, 3/TR6, ILT3, ILT4, HVEM, an agonist or antibody that binds Toll ligand receptor, and a ligand that specifically binds with B7-H3. An immunomodulatory domain or “MOD” of a TMP of the present disclosure can bind a cognate costimulatory polypeptide that is present on a target T cell.

[0033] As used herein the term “in vivo” refers to any process or procedure occurring inside of the body.

[0034] As used herein, “in vitro” refers to any process or procedure occurring outside of the body.

[0035] “Heterologous,” as used herein, means a nucleotide or polypeptide that is not found in the native nucleic acid or protein, respectively.

[0036] “Recombinant,” as used herein, means that a particular nucleic acid (DNA or RNA) is the product of various combinations of cloning, restriction, polymerase chain reaction (PCR) and/or ligation steps resulting in a construct having a structural coding or non-coding sequence distinguishable from endogenous nucleic acids found in natural systems. DNA sequences encoding polypeptides can be assembled from cDNA fragments or from a series of synthetic oligonucleotides, to provide a synthetic nucleic acid which is capable of being expressed from a recombinant transcriptional unit contained in a cell or in a cell-free transcription and translation system.

[0037] The terms “recombinant expression vector,” or “DNA construct” are used interchangeably herein to refer to a DNA molecule comprising a vector and at least one insert. Recombinant expression vectors are usually generated for the purpose of expressing and/or propagating the insert(s), or for the construction of other recombinant nucleotide sequences. The insert(s) may or may not be operably linked to a promoter sequence and may or may not be operably linked to DNA regulatory sequences.

[0038] As used herein, the term “affinity” refers to the equilibrium constant for the reversible binding of two agents (e.g., an antibody and an antigen) and is expressed as a dissociation constant (K_{D}). Affinity can be at least 1-fold greater, at least 2-fold greater, at least 3-fold greater, at least 4-fold greater, at least 5-fold greater, at least 6-fold greater, at least 7-fold greater, at least 8-fold greater, at least 9-fold greater, at least 10-fold greater, at least 20-fold greater, at least 30-fold greater, at least 40-fold greater, at least 50-fold greater, at least 60-fold greater, at least 70-fold greater, at least 80-fold greater, at least 90-fold greater, at least 100-fold greater, or at least 1,000-fold greater, or more, than the affinity of an antibody for unrelated amino acid sequences. Affinity of an antibody to a target protein can be, for example, from about 100 nanomolar (nM) to about 0.1 nM, from about 100 nM to about 1 picomolar (pM), or from about 100 nM to about 1 femtomolar (fM) or more. As used herein, the term “avidity” refers to the resistance of a complex of two or more agents to dissociation after dilution. The terms “immunoreactive” and “preferentially binds” are used interchangeably herein with respect to antibodies and/or antigen-binding fragments.

[0039] The term “binding,” as used herein (e.g. with reference to binding of a TMP to a polypeptide (e.g., a T-cell receptor) on a T cell), refers to a non-covalent interaction between two molecules. Non-covalent binding refers to a direct association between two molecules, due to, for example, electrostatic, hydrophobic, ionic, and/or hydrogen-bond interactions, including interactions such as salt bridges and water bridges. Non-covalent binding interactions are generally characterized by a dissociation constant (K_{D}) of less than 10⁻⁶M, less than 10⁻⁷ M, less than 10⁻⁸ M, less than 10⁻⁹ M, less than 10⁻¹⁰ M, less than 10⁻¹¹ M, less than 10⁻¹² M, less than 10⁻¹³ M, less than 10⁻¹⁴ M, or less than 10⁻¹⁵ M. “Affinity” refers to the strength of non-covalent binding, increased binding affinity being correlated with a lower K_{D}. “Specific binding” generally refers to binding with an affinity of at least about 10⁻⁷ M or greater, e.g., 5×10⁻⁷ M, 10⁻⁸ M, 5×10⁻⁸M, 10⁻⁹ M, and greater. “Non-specific binding” generally refers to binding (e.g., the binding of a ligand to a moiety other than its designated binding site or receptor) with an affinity of less than about 10⁻⁷ M (e.g., binding with an affinity of 10⁻⁶ M, 10⁻⁵ M, 10⁻⁴ M). However, in some contexts, e.g., binding between a TCR and a peptide/MHC complex, “specific binding” can be in the range of from 1 μM to 100 μM, or from 100 μM to 1 mM. “Covalent binding” or “covalent bond,” as used herein, refers to the formation of one or more covalent chemical binds between two different molecules.

[0040] “Phosphate buffer saline” or “PBS”, as used herein, means a water-based buffer solution, typically available as a concentrated solution. Unless stated otherwise, the PBS solution used in this disclosure contains sodium chloride (500 mM), sodium phosphate dibasic (10 mM), potassium phosphate monobasic (2 mM), potassium chloride (2.7 mM), and the rest water. The pH of the PBS is 7.5±0.15. The buffer is prepared in 18.2 megohms DNase, and RNase free water and filtered through 0.22 micron filter.

[0041] The terms “treatment”, “treating” and the like are used herein to generally mean obtaining a desired pharmacologic and/or physiologic effect. The effect may be prophylactic in terms of completely or partially preventing a disease or symptom thereof and/or may be therapeutic in terms of a partial or complete cure for a disease and/or adverse effect attributable to the disease. “Treatment” as used herein covers any treatment of a disease or symptom in a mammal, and includes: (a) preventing the disease or symptom from occurring in a subject which may be predisposed to acquiring the disease or symptom but has not yet been diagnosed as having it; (b) inhibiting the disease or symptom, i.e., arresting its development; and/or (c) relieving the disease, i.e., causing regression of the disease. The therapeutic agent may be administered before, during or after the onset of disease or injury. The treatment of ongoing disease, where the treatment stabilizes or reduces the undesirable clinical symptoms of the patient, is of particular interest. Such treatment is desirably performed prior to complete loss of function in the affected tissues. The subject therapy will desirably be administered during the symptomatic stage of the disease, and in some cases after the symptomatic stage of the disease.

[0042] The terms “individual,” “subject,” “host,” and “patient,” are used interchangeably herein and refer to any mammalian subject for whom diagnosis, treatment, or therapy is desired. Mammals include, e.g., humans, non-human primates, rodents (e.g., rats; mice), lagomorphs (e.g., rabbits), ungulates (e.g., cows, sheep, pigs, horses, goats, and the like), etc.

[0043] Unless indicated otherwise, the term “substantially” is intended to encompass both “wholly” and “largely but not wholly”. For example, an Ig Fc that “substantially does not induce cell lysis” means an Ig Fc that induces no cell lysis at all or that largely does not induce cell lysis.

[0044] As used herein, the term “about” used in connection with an amount indicates that the amount can vary by 10% of the stated amount. For example, “about 100” means an amount of from 90-110. Where about is used in the context of a range, the “about” used in reference to the lower amount of the range means that the lower amount includes an amount that is 10% lower than the lower amount of the range, and “about” used in reference to the higher amount of the range means that the higher amount includes an amount 10% higher than the higher amount of the range. For example, from about 100 to about 1000 means that the range extends from 90 to 1100.

[0045] As used herein, the term “MHC heavy chain polypeptide” means collectively the domains of an MHC heavy chain polypeptide that are present in a TMP. For example, as illustrated in FIGS. 17 and 18, the MHC heavy chain polypeptide can comprise the α1, α2 and α3 domains.

[0046] Before the present disclosure is further described, it is to be understood that this disclosure is not limited to particular embodiments described, as such may, of course, vary. It is also to be understood that the terminology used herein is for the purpose of describing particular embodiments only, and is not intended to be limiting, since the scope of the present disclosure will be limited only by the appended claims.

[0047] Where a range of values is provided, it is understood that each intervening value, to the tenth of the unit of the lower limit unless the context clearly dictates otherwise, between the upper and lower limit of that range and any other stated or intervening value in that stated range, is encompassed within the disclosure. The upper and lower limits of these smaller ranges may independently be included in the smaller ranges, and are also encompassed within the disclosure, subject to any specifically excluded limit in the stated range. Where the stated range includes one or both of the limits, ranges excluding either or both of those included limits are also included in the disclosure.

[0048] Unless defined otherwise, all technical and scientific terms used herein have the same meaning as commonly understood by one of ordinary skill in the art to which this disclosure belongs. Although any methods and materials similar or equivalent to those described herein can also be used in the practice or testing of the present disclosure, the preferred methods and materials are now described. All publications mentioned herein are incorporated herein by reference to disclose and describe the methods and/or materials in connection with which the publications are cited.

[0049] It must be noted that as used herein and in the appended claims, the singular forms “a,” “an,” and “the” include plural referents unless the context clearly dictates otherwise. Thus, for example, reference to a “T-cell modulatory polypeptide” includes a plurality of such polypeptides and reference to “the immunomodulatory polypeptide” includes reference to one or more immunomodulatory polypeptides and equivalents thereof known to those skilled in the art, and so forth. It is further noted that the claims may be drafted to exclude any optional element. As such, this statement is intended to serve as antecedent basis for use of such exclusive terminology as “solely,” “only” and the like in connection with the recitation of claim elements, or use of a “negative” limitation.

[0050] It is appreciated that certain features of the disclosure, which are, for clarity, described in the context of separate embodiments, may also be provided in combination in a single embodiment. Conversely, various features of the disclosure, which are, for brevity, described in the context of a single embodiment, may also be provided separately or in any suitable sub-combination. All combinations of the embodiments pertaining to the disclosure are specifically embraced by the present disclosure and are disclosed herein just as if each and every combination was individually and explicitly disclosed. In addition, all sub-combinations of the various embodiments and elements thereof are also specifically embraced by the present disclosure and are disclosed herein just as if each and every such sub-combination was individually and explicitly disclosed herein.

[0051] The publications discussed herein are provided solely for their disclosure prior to the filing date of the present application. Nothing herein is to be construed as an admission that the present disclosure is not entitled to antedate such publication. Further, the dates of publication provided may be different from the actual publication dates which may need to be independently confirmed.

### DETAILED DESCRIPTION

[0052] The present disclosure provides T-cell modulatory polypeptides that comprise an immunomodulatory polypeptide and that comprise an epitope-presenting peptide. A TMP is useful for modulating the activity of a T cell, and for modulating an immune response in an individual.

### T-Cell Modulatory Polypeptides

[0053] The present disclosure provides a T-cell modulatory polypeptide (TMP), comprising: a) a first polypeptide; and b) a second polypeptide, wherein the TMP comprises: i) a KRAS peptide that, when bound to major histocompatibility complex (MHC) polypeptides, presents an epitope to a T-cell receptor (TCR); ii) a first MHC polypeptide; iii) a second MHC polypeptide; and iv) one or more immunomodulatory polypeptides; and optionally an immunoglobulin (Ig) Fc polypeptide or a non-Ig scaffold. A TMP comprising a first polypeptide and a second polypeptide also may be referred to herein as a “split-chain TMP” or a “heterodimeric TMP.” As discussed herein, the first and second polypeptides of such TMPs typically will be covalently linked to each other by one or more disulfide bonds, which can provide stability and/or improved expression to the TMP.

[0054] In some cases, however, a TMP of the present disclosure can comprise multiple different polypeptides that are linked together to form a single polypeptide chain. Such a single-chain TMP can comprise, e.g., i) a KRAS peptide that, when bound to major histocompatibility complex (MHC) polypeptides, presents an epitope to a T-cell receptor (TCR); ii) first and second MHC polypeptides; and iii) one or more immunomodulatory polypeptides; and optionally an immunoglobulin (Ig) Fc polypeptide or a non-Ig scaffold. As discussed below, heterodimeric TMPs and single-chain TMPs can self-assemble into dimers, e.g., when the TMP comprises an Ig Fc, e.g., an IgG1 Fc. In such cases, disulfide bonds will spontaneously form to bond the two TMPs.

[0055] As used herein, the term “KRAS peptide” means a peptide having a length of at least 4 amino acids, e.g., from 4 amino acids to about 25 amino acids (e.g., 4 amino acids (aa), 5 aa, 6 aa, 7 aa, 8 aa, 9 aa, 10 aa, 11 aa, 12 aa, 13 aa, 14 aa, 15 aa, 16 aa, 17 aa, 18 aa, 19 aa, 20 aa, 21 aa, 22 aa, 23 aa, 24 aa, or 25 aa, including within a range of from 4 to 20 amino acids, from 6 to 18 amino acids, from 8 to 15 amino acids, from 8 to 12 amino acids, from 5 to 10 amino acids, from 10 to 20 amino acids, and from 15 to 25 amino acids in length) that presents a KRAS epitope to a TCR when the KRAS peptide is bound to an MHC complex. As used herein, the term “KRAS epitope” means an epitope found on a KRAS protein. As used herein, the terms “KRAS” and “KRAS protein” are synonymous and mean a protein having an amino acid sequence present in one of the following: (i) a KRAS4A polypeptide; (ii) a KRAS4B; and (iii) variants of (i) and (ii) that occur in a human cancer, including, e.g., mutated forms. As used herein, the term “KRAS polypeptide” means a polypeptide having a sequence of amino acids found in all or a part of a KRAS protein, or where specified, a polypeptide having at least 75%, at least 80%, at least 85%, at least 90%, at least 95%, at least 98%, at least 99%, or 100% amino acid sequence identity to a sequence of amino acids found in all or a part of a KRAS protein or a variant that occurs in a human cancer, including, e.g., mutated forms.

[0056] KRAS (also known as “KRAS proto-oncogene, GTPase,” Kirsten rat sarcoma viral oncogene homolog,” and “K-Ras P21 protein”) is a GTPase that controls cell proliferation. When mutated, KRAS can fail to control cell proliferation, leading to cancer.

[0057] A wild-type (normal; non-cancer-associated) KRAS polypeptide can have the following amino acid sequence: [sequence omitted] (SEQ ID NO:1).

[0058] A wild-type (normal; non-cancer-associated) KRAS polypeptide can have the following amino acid sequence: [sequence omitted] (SEQ ID NO:2).

[0059] Mutated forms of KRAS are associated with certain cancers; and at least a portion of the mutated form of KRAS is present on the surface of certain cancer cells. See, e.g., Prior et al. (2012) Cancer Res. 72:2457; and Warren and Holt (2010) Human Immunology 71:245. In SEQ ID NO:1 and SEQ ID NO:2, amino acids G12, G13, T35, I36, E49, Q61, K127, and A156 are in bold and underlined; substitutions of one or more of these residues can be present in a cancer-associated form of a KRAS polypeptide. A cancer-associated KRAS polypeptide can include one or more of: i) a substitution of G12 (e.g. G12C, G12V, G125, G12A, G12R, G12F, or G12D); ii) a substitution of G13 (e.g. G13C, G13D, G13R, G13V, G13S, or G13A); iii) a substitution of T35 (e.g., T35I); iv) a substitution of 136 (e.g., I36L or I36M); v) a substitution of E49 (e.g., E49K); vi) a substitution of Q61 (e.g. Q61H, Q61R, Q61P, Q61E, Q61K, Q61L, or Q61K); vii) a substitution of K117 (e.g., K117N); and viii) a substitution of A146 (e.g. A146T or A146V); where the amino acid numbering is as set out in SEQ ID NO:1 and SEQ ID NO:2. See, e.g., U.S. 2019/0194192.

[0060] For example, a cancer-associated, mutated form of a KRAS polypeptide can have one or more amino acid substitutions compared to the amino acid sequence set forth in SEQ ID NO:1 or SEQ ID NO:2. In some cases, a cancer-associated, mutated form of a KRAS polypeptide has only a single amino acid substitution compared to the amino acid sequence set forth in SEQ ID NO:1 or SEQ ID NO:2. In some cases, a cancer-associated, mutated form of a KRAS polypeptide has only two amino acid substitutions compared to the amino acid sequence set forth in SEQ ID NO:1 or SEQ ID NO:2. In some cases, a cancer-associated, mutated form of a KRAS polypeptide has only three amino acid substitutions compared to the amino acid sequence set forth in SEQ ID NO:1 or SEQ ID NO:2. In some cases, a cancer-associated, mutated form of a KRAS polypeptide has only four amino acid substitutions compared to the amino acid sequence set forth in SEQ ID NO:1 or SEQ ID NO:2. In some cases, a cancer-associated, mutated form of a KRAS polypeptide has only five amino acid substitutions compared to the amino acid sequence set forth in SEQ ID NO:1 or SEQ ID NO:2.

[0061] For example, KRAS(G12D) (a KRAS polypeptide having a G-to-D substitution at amino acid position 12, based on the amino acid numbering set forth in SEQ ID NO:1) is associated with pancreatic ductal adenocarcinoma (PDAC). KRAS(G12V) (a KRAS polypeptide having a G-to-V substitution at amino acid position 12, based on the amino acid numbering set forth in SEQ ID NO:1 or SEQ ID NO:2) is also associated with pancreatic cancer. KRAS(G12R) (a KRAS polypeptide having a G-to-R substitution at amino acid position 12, based on the amino acid numbering set forth in SEQ ID NO:1 or SEQ ID NO:2) is also associated with pancreatic cancer. See, e.g., Waters and Der (2018) Cold Spring Harb. Perspect. Med. 8:(9). pii: a031435. doi: 10.1101/cshperspect.a031435. As another example, KRAS(G12C) (a KRAS polypeptide having a G-to-C substitution at amino acid position 12, based on the amino acid numbering set forth in SEQ ID NO:1 or SEQ ID NO:2) is associated with lung cancer, e.g., non-small cell lung cancer. See, e.g., Roman et al. (2018) Mol. Cancer 17:33. Other mutated forms of KRAS (e.g., G12A; G12C; G12D; G12R; G12S; G12V; G13A; G13C; G13D; G13R; G13S; G13V) are associated with various cancers; where such cancers include, e.g., bile duct carcinoma, gall bladder carcinoma, adenocarcinoma, rectal adenocarcinoma, endometrial carcinoma, hematopoietic neoplasms, and lung cancer. See, e.g., Prior et al. (20120 Cancer Res. 72:2457.

[0062] As another example, a cancer-associated, mutated form of a KRAS polypeptide can have an amino acid substitution at amino acid 61 of a KRAS polypeptide (e.g., a KRAS polypeptide having the amino acid sequence set forth in SEQ ID NO:1 or SEQ ID NO:2). For example, a cancer-associated, mutated form of a KRAS polypeptide can have an amino acid substitution such as Q61H, Q61L, Q61E, Q61R, or Q61K.

[0063] As discussed above, in some cases the present disclosure provides a TMP comprising a heterodimer, wherein the heterodimer comprises: a) a first polypeptide comprising a first MHC polypeptide; and b) a second polypeptide comprising a second MHC polypeptide, wherein the first polypeptide or the second polypeptide comprises a KRAS peptide (e.g., a KRAS peptide comprising a cancer-associated mutation; where the KRAS peptide has a length of a least 4 amino acids (e.g., from 4 amino acids to about 25 amino acids); where the KRAS peptide, when bound to an MHC complex, presents an epitope to a T-cell receptor); wherein the first polypeptide and/or the second polypeptide comprises one or more immunomodulatory polypeptides that can be the same or different from one another; and optionally an Ig Fc polypeptide or a non-Ig scaffold. In some cases, at least one of the one or more immunomodulatory polypeptides is a variant immunomodulatory polypeptide that exhibits reduced affinity to a cognate costimulatory polypeptide compared to the affinity of a corresponding wild-type immunomodulatory polypeptide for the cognate costimulatory polypeptide.

[0064] The KRAS peptide/MHC complex present in a TMP of the present disclosure binds to a T-cell receptor (TCR) on a T cell with an affinity of at least 100 μM (e.g., at least 10 μM, at least 1 μM, at least 100 nM, at least 10 nM, or at least 1 nM). Generally speaking, a TMP of the present disclosure binds to a T cell having a cognate costimulatory polypeptide and a TCR that binds the KRAS peptide/MHC complex of the TMP with an affinity that is greater, e.g., 25% greater, than the affinity with which the same TMP binds a second T cell that has the same cognate costimulatory polypeptide but has a TCR that substantially does not bind the KRAS peptide/MHC complex, e.g., the KRAS peptide/MHC complex binds to the TCR with an affinity less than 10⁻⁷ M.

[0065] The present disclosure provides a TMP, wherein the TMP is a heterodimer comprising: a) a first polypeptide comprising a first MHC polypeptide; and b) a second polypeptide comprising a second MHC polypeptide, wherein the first polypeptide or the second polypeptide comprises a KRAS peptide; wherein the first polypeptide and/or the second polypeptide comprises one or more immunomodulatory polypeptides that can be the same or different, and wherein at least one of the one or more immunomodulatory polypeptides may be a wild-type immunomodulatory polypeptide or a variant of a wild-type immunomodulatory polypeptide, wherein the variant immunomodulatory polypeptide comprises 1, 2, 3, 4, 5, 6, 7, 8, 9, 10, 11, 12, 13, 14, 15, 16, 17, 18, 19, or 20 amino acid substitutions compared to the amino acid sequence of the corresponding wild-type immunomodulatory polypeptide; and wherein the first polypeptide or the second polypeptide optionally comprises an Ig Fc polypeptide or a non-Ig scaffold. In some cases, at least one of the one or more immunomodulatory domains is a variant immunomodulatory polypeptide that exhibits reduced affinity to a cognate costimulatory polypeptide compared to the affinity of a corresponding wild-type immunomodulatory polypeptide for the cognate costimulatory polypeptide, e.g., the ratio of (i) the binding affinity of a wild-type immunomodulatory polypeptide to a cognate costimulatory polypeptide to (ii) the binding affinity of the variant of the wild-type immunomodulatory polypeptide to the cognate costimulatory polypeptide, when measured by bio-layer interferometry, is in a range of from 1.5:1 to 10⁶:1; and wherein the variant immunomodulatory polypeptide comprises 1, 2, 3, 4, 5, 6, 7, 8, 9, 10, 11, 12, 13, 14, 15, 16, 17, 18, 19, or 20 amino acid substitutions compared to the amino acid sequence of the corresponding wild-type immunomodulatory polypeptide; and wherein the first polypeptide or the second polypeptide optionally comprises an Ig Fc polypeptide or a non-Ig scaffold.

[0066] In some cases, a heterodimeric TMP of this disclosure may comprise: a) a first polypeptide comprising, in order from N-terminus to C-terminus: i) a KRAS peptide; ii) a first MHC polypeptide; and b) a second polypeptide comprising, in order from N-terminus to C-terminus: i) a second MHC polypeptide; and ii) optionally an immunoglobulin (Ig) Fc polypeptide or a non-Ig scaffold, wherein the TMP comprises one or more immunomodulatory domains that can be the same or different, wherein at least one of the one or more immunomodulatory domain is: A) at the C-terminus of the first polypeptide; B) at the N-terminus of the second polypeptide; C) at the C-terminus of the second polypeptide; or D) at the C-terminus of the first polypeptide and at the N-terminus of the second polypeptide, and wherein at least one of the one or more immunomodulatory domains may be a wild-type immunomodulatory polypeptide or a variant of a wild-type immunomodulatory polypeptide, wherein the variant immunomodulatory polypeptide comprises 1, 2, 3, 4, 5, 6, 7, 8, 9, 10, 11, 12, 13, 14, 15, 16, 17, 18, 19, or 20 amino acid substitutions compared to the amino acid sequence of the corresponding wild-type immunomodulatory polypeptide.

[0067] The present disclosure provides a TMP comprising, as a basic scaffold: a) a first polypeptide comprising, in order from N-terminus to C-terminus: i) a KRAS peptide; ii) a first MHC polypeptide; and b) a second polypeptide comprising, in order from N-terminus to C-terminus: i) a second MHC polypeptide; and ii) optionally an Ig Fc polypeptide or a non-Ig scaffold. A TMP of the present disclosure further comprises one or more immunomodulatory polypeptides, wherein at least one of the one or more immunomodulatory polypeptides is: A) at the C-terminus of the first polypeptide; B) at the N-terminus of the second polypeptide; C) at the C-terminus of the second polypeptide; or D) at the C-terminus of the first polypeptide and at the N-terminus of the second polypeptide. In some cases, at least one of the one or more immunomodulatory polypeptides is a variant immunomodulatory polypeptide that exhibits reduced affinity to a cognate costimulatory polypeptide compared to the affinity of a corresponding wild-type immunomodulatory polypeptide for the cognate costimulatory polypeptide.

[0068] The KRAS peptide/MHC complex present in a TMP of the present disclosure binds to a T-cell receptor (TCR) on a T cell with an affinity of at least 100 μM (e.g., at least 10 μM, at least 1 μM, at least 100 nM, at least 10 nM, or at least 1 nM).

[0069] As noted above, in some cases, a TMP of the present disclosure comprises a single polypeptide chain. Such single-chain TMPs of the present disclosure comprise: i) a first MHC polypeptide; ii) a second MHC polypeptide; iii) a KRAS peptide that, when bound to MHC polypeptides, presents an epitope to a TCR; and iv) one or more immunomodulatory polypeptides; and optionally an Ig Fc polypeptide or a non-Ig scaffold.

[0070] In some cases, a single-chain TMP of the present disclosure comprises, in order from N-terminus to C-terminus: i) a KRAS peptide; ii) a first MHC polypeptide; iii) a second MHC polypeptide; iv) one or more immunomodulatory polypeptides; and v) an Ig Fc polypeptide. In some cases, a single-chain TMP of the present disclosure comprises, in order from N-terminus to C-terminus: i) a KRAS peptide; ii) a β2M polypeptide; iii) a class I MHC heavy chain polypeptide; iv) one or more immunomodulatory polypeptides; and v) an Ig Fc polypeptide. This arrangement of components is referred to as MOD Position 2 in FIG. 18.

[0071] In some cases, a single-chain TMP of the present disclosure comprises, in order from N-terminus to C-terminus: i) a KRAS peptide; ii) a first MHC polypeptide; iii) a second MHC polypeptide; iv) an Ig Fc polypeptide; and v) one or more immunomodulatory polypeptides. In some cases, a single-chain TMP of the present disclosure comprises, in order from N-terminus to C-terminus: i) a KRAS peptide; ii) a β2M polypeptide; iii) a class I MHC heavy chain polypeptide; iv) an Ig Fc polypeptide; and v) one or more immunomodulatory polypeptides. This arrangement of components is referred to as MOD Position 3 in FIG. 18.

[0072] In some cases, a single-chain TMP of the present disclosure comprises, in order from N-terminus to C-terminus: i) one or more immunomodulatory polypeptides; ii) a KRAS peptide; iii) a first MHC polypeptide; iv) a second MHC polypeptide; and v) an Ig Fc polypeptide. In some cases, a single-chain TMP of the present disclosure comprises, in order from N-terminus to C-terminus: i) one or more immunomodulatory polypeptides; ii) a KRAS peptide; iii) a first class I MHC polypeptide; iv) a second class I MHC polypeptide; and v) an Ig Fc polypeptide. In some cases, a single-chain TMP of the present disclosure comprises, in order from N-terminus to C-terminus: i) one or more immunomodulatory polypeptides; ii) a KRAS peptide; iii) a β2M polypeptide; iv) a class I MHC heavy chain polypeptide; and v) an Ig Fc polypeptide. This arrangement of components is referred to as MOD Position 4 in FIG. 18.

[0073] In some cases, the KRAS peptide/MHC complex present in a TMP of the present disclosure binds to a TCR on a T cell with an affinity of from about 10⁻⁴M to about 5×10⁻⁴M, from about 5×10⁻⁴ M to about 10⁻⁵ M, from about 10⁻⁵ M to 5×10⁻⁵ M, from about 5×10⁻⁵ M to 10⁻⁶ M, from about 10⁻⁶ M to about 5×10⁻⁶ M, from about 5×10⁻⁶ M to about 10⁻⁷ M, from about 10⁻⁷ M to about 5×10⁻⁷ M, from about 5×10⁻⁷ M to about 10⁻⁸M, or from about 10⁻⁸M to about 10⁻⁹ M. Expressed another way, in some cases, the KRAS peptide/MHC complex present in a TMP of the present disclosure binds to a TCR on a T cell with an affinity of from about 1 nM to about 5 nM, from about 5 nM to about 10 nM, from about 10 nM to about 50 nM, from about 50 nM to about 100 nM, from about 0.1 μM to about 0.5 μM, from about 0.5 μM to about 1 μM, from about 1 μM to about 5 μM, from about 5 μM to about 10 μM, from about 10 μM to about 25 μM, from about 25 μM to about 50 μM, from about 50 μM to about 75 μM, from about 75 μM to about 100 μM.

[0074] In some cases, an immunomodulatory polypeptide present in a TMP of the present disclosure binds to its cognate costimulatory polypeptide with an affinity that it at least 10% less, at least 15% less, at least 20% less, at least 25% less, at least 30% less, at least 35% less, at least 40% less, at least 45% less, at least 50% less, at least 55% less, at least 60% less, at least 65% less, at least 70% less, at least 75% less, at least 80% less, at least 85% less, at least 90% less, at least 95% less, or more than 95% less, than the affinity of a corresponding wild-type immunomodulatory polypeptide for the cognate costimulatory polypeptide.

[0075] In some cases, a variant immunomodulatory polypeptide present in a TMP of the present disclosure has a binding affinity for a cognate costimulatory polypeptide that is from 1 nM to 100 nM, or from 100 nM to 100 μM. For example, in some cases, a variant immunomodulatory polypeptide present in a TMP of the present disclosure has a binding affinity for a cognate costimulatory polypeptide that is from about 100 nM to 150 nM, from about 150 nM to about 200 nM, from about 200 nM to about 250 nM, from about 250 nM to about 300 nM, from about 300 nM to about 350 nM, from about 350 nM to about 400 nM, from about 400 nM to about 500 nM, from about 500 nM to about 600 nM, from about 600 nM to about 700 nM, from about 700 nM to about 800 nM, from about 800 nM to about 900 nM, from about 900 nM to about 1 μM, to about 1 μM to about 5 μM, from about 5 μM to about 10 μM, from about 10 μM to about 15 μM, from about 15 μM to about 20 μM, from about 20 μM to about 25 μM, from about 25 μM to about 50 μM, from about 50 μM to about 75 μM, or from about 75 μM to about 100 μM. In some cases, a variant immunomodulatory polypeptide present in a TMP of the present disclosure has a binding affinity for a cognate costimulatory polypeptide that is from about 1 nM to about 5 nM, from about 5 nM to about 10 nM, from about 10 nM to about 50 nM, from about 50 nM to about 100 nM.

[0076] The combination of the reduced affinity of the immunomodulatory polypeptide for its cognate costimulatory polypeptide, and the affinity of the KRAS peptide for a TCR, provides for enhanced selectivity of a TMP of the present disclosure. For example, a TMP of the present disclosure binds selectively to a first T cell that displays both: i) a TCR specific for the KRAS peptide present in the TMP; and ii) a costimulatory polypeptide that binds to the immunomodulatory polypeptide present in the TMP, compared to binding to a second T cell that displays: i) a TCR specific for an epitope other than the epitope present in the TMP; and ii) a costimulatory polypeptide that binds to the immunomodulatory polypeptide present in the TMP. For example, a TMP of the present disclosure binds to the first T cell with an affinity that is at least 10%, at least 15%, at least 20%, at least 25%, at least 30%, at least 40%, at least 50%, at least 60%, at least 70%, at least 80%, at least 90%, at least 2-fold, at least 2.5-fold, at least 5-fold, at least 10-fold, at least 15-fold, at least 20-fold, at least 25-fold, at least 50-fold, at least 100-fold, or more than 100-fold, higher than the affinity to which it binds the second T cell.

[0077] In some cases, a TMP of the present disclosure, when administered to an individual in need thereof, induces both an epitope-specific T cell response and an epitope non-specific T cell response. In other words, in some cases, a TMP of the present disclosure, when administered to an individual in need thereof, induces an epitope-specific T cell response by modulating the activity of a first T cell that displays both: i) a TCR specific for the KRAS epitope present in the TMP; ii) a costimulatory polypeptide that binds to the immunomodulatory polypeptide present in the TMP; and induces an epitope non-specific T cell response by modulating the activity of a second T cell that displays: i) a TCR specific for an epitope other than the KRAS epitope present in the TMP; and ii) a costimulatory polypeptide that binds to the immunomodulatory polypeptide present in the TMP. The ratio of the epitope-specific T cell response to the epitope-non-specific T cell response is at least 2:1, at least 5:1, at least 10:1, at least 15:1, at least 20:1, at least 25:1, at least 50:1, or at least 100:1. The ratio of the epitope-specific T cell response to the epitope-non-specific T cell response is from about 2:1 to about 5:1, from about 5:1 to about 10:1, from about 10:1 to about 15:1, from about 15:1 to about 20:1, from about 20:1 to about 25:1, from about 25:1 to about 50:1, or from about 50:1 to about 100:1, or more than 100:1. “Modulating the activity” of a T cell can include one or more of: i) activating a cytotoxic (e.g., CD8⁺) T cell; ii) inducing cytotoxic activity of a cytotoxic (e.g., CD8⁺) T cell; iii) inducing production and release of a cytotoxin (e.g., a perforin; a granzyme; a granulysin) by a cytotoxic (e.g., CD8⁺) T cell; iv) inducing proliferation of a cytotoxic (e.g., CD8⁺) T cell; v) inhibiting activity of an autoreactive T cell; and the like.

[0078] The combination of the reduced affinity of the immunomodulatory polypeptide for its cognate costimulatory polypeptide, and the affinity of the KRAS epitope for a TCR, provides for enhanced selectivity of a TMP of the present disclosure. Thus, for example, a TMP of the present disclosure binds with higher avidity to a first T cell that displays both: i) a TCR specific for the KRAS epitope present in the TMP; and ii) a costimulatory polypeptide that binds to the immunomodulatory polypeptide present in the TMP, compared to the avidity to which it binds to a second T cell that displays: i) a TCR specific for an epitope other than the epitope present in the TMP; and ii) a costimulatory polypeptide that binds to the immunomodulatory polypeptide present in the TMP.

[0079] Binding affinity between an immunomodulatory polypeptide and its cognate costimulatory polypeptide can be determined by bio-layer interferometry (BLI) using purified immunomodulatory polypeptide and purified cognate costimulatory polypeptide. Binding affinity between a TMP and its cognate costimulatory polypeptide can be determined by BLI using purified TMP and the cognate costimulatory polypeptide. BLI methods are well known to those skilled in the art. See, e.g., Lad et al. (2015) J. Biomol. Screen. 20(4):498-507; and Shah and Duncan (2014) J. Vis. Exp. 18:e51383.

[0080] A BLI assay can be carried out using an Octet RED 96 (Pal FortéBio) instrument, or a similar instrument, as follows. A TMP (e.g., a TMP of the present disclosure; a control TMP (where a control TMP comprises a wild-type immunomodulatory polypeptide)) is immobilized onto an insoluble support (a “biosensor”). The immobilized TMP is the “target” Immobilization can be effected by immobilizing a capture antibody onto the insoluble support, where the capture antibody immobilizes the TMP. For example, immobilization can be effected by immobilizing anti-Fc (e.g., anti-human IgG Fc) antibodies onto the insoluble support, where the immobilized anti-Fc antibodies bind to and immobilize the TMP (where the TMP comprises an Ig Fc polypeptide). A costimulatory polypeptide is applied, at several different concentrations, to the immobilized TMP, and the instrument's response recorded. Assays are conducted in a liquid medium comprising 25 mM HEPES pH 6.8, 5% poly(ethylene glycol) 6000, 50 mM KCl, 0.1% bovine serum albumin, and 0.02% Tween 20 nonionic detergent. Binding of the costimulatory polypeptide to the immobilized TMP is conducted at 30° C. As a positive control for binding affinity, an anti-MHC class I monoclonal antibody can be used. For example, anti-HLA Class I monoclonal antibody W6/32 (American Type Culture Collection No. HB-95; Parham et al. (1979) J. Immunol. 123:342), which has a K_{D} of 7 nM, can be used. A standard curve can be generated using serial dilutions of the anti-MHC class I monoclonal antibody. The costimulatory polypeptide, or the anti-MHC class I mAb, is the “analyte.” BLI analyzes the interference pattern of white light reflected from two surfaces: i) from the immobilized polypeptide (“target”); and ii) an internal reference layer. A change in the number of molecules (“analyte”; e.g., costimulatory polypeptide; anti-HLA antibody) bound to the biosensor tip causes a shift in the interference pattern; this shift in interference pattern can be measured in real time. The two kinetic terms that describe the affinity of the target/analyte interaction are the association constant (kₐ) and dissociation constant (k_{d}). The ratio of these two terms (k_{d/a}) gives rise to the affinity constant K_{D}.

[0081] The BLI assay is carried out in a multi-well plate. To run the assay, the plate layout is defined, the assay steps are defined, and biosensors are assigned in Octet Data Acquisition software. The biosensor assembly is hydrated. The hydrated biosensor assembly and the assay plate are equilibrated for 10 minutes on the Octet instrument. Once the data are acquired, the acquired data are loaded into the Octet Data Analysis software. The data are processed in the Processing window by specifying method for reference subtraction, y-axis alignment, inter-step correction, and Savitzky-Golay filtering. Data are analyzed in the Analysis window by specifying steps to analyze (Association and Dissociation), selecting curve fit model (1:1), fitting method (global), and window of interest (in seconds). The quality of fit is evaluated. K_{D} values for each data trace (analyte concentration) can be averaged if within a 3-fold range. K_{D} error values should be within one order of magnitude of the affinity constant values; R² values should be above 0.95. See, e.g., Abdiche et al. (2008) J. Anal. Biochem. 377:209.

[0082] Unless otherwise stated herein, the affinity of a TMP of the present disclosure for a cognate costimulatory polypeptide, or the affinity of a control TMP (where a control TMP comprises a wild-type immunomodulatory polypeptide) for a cognate costimulatory polypeptide, is determined using BLI, as described above.

[0083] In some cases, the ratio of: i) the binding affinity of a control TMP (where the control comprises a wild-type immunomodulatory polypeptide) to a cognate costimulatory polypeptide to ii) the binding affinity of a TMP of the present disclosure comprising a variant of the wild-type immunomodulatory polypeptide to the cognate costimulatory polypeptide, when measured by BLI (as described above), is at least 1.5:1, at least 2:1, at least 5:1, at least 10:1, at least 15:1, at least 20:1, at least 25:1, at least 50:1, at least 100:1, at least 500:1, at least 10²:1, at least 5×10²:1, at least 10³:1, at least 5×10³:1, at least 10⁴:1, at least 10⁵:1, or at least 10⁶:1. In some cases, the ratio of: i) the binding affinity of a control TMP (where the control comprises a wild-type immunomodulatory polypeptide) to a cognate costimulatory polypeptide to ii) the binding affinity of a TMP of the present disclosure comprising a variant of the wild-type immunomodulatory polypeptide to the cognate costimulatory polypeptide, when measured by BLI, is in a range of from 1.5:1 to 10⁶:1, e.g., from 1.5:1 to 10:1, from 10:1 to 50:1, from 50:1 to 10²:1, from 10²:1 to 10³:1, from 10³:1 to 10⁴:1, from 10⁴:1 to 10⁵:1, or from 10⁵:1 to 10⁶:1.

[0084] As an example, where a control TMP comprises a wild-type IL-2 polypeptide, and where a TMP of the present disclosure comprises a variant IL-2 polypeptide (comprising from 1 to 10 amino acid substitutions relative to the amino acid sequence of the wild-type IL-2 polypeptide), e.g. the IL-2 variant comprising the H16A and F42A substitutions described herein, as the immunomodulatory polypeptide, the ratio of: i) the binding affinity of the control TMP to an IL-2 receptor (i.e., the cognate costimulatory polypeptide) to ii) the binding affinity of the TMP of the present disclosure to the IL-2 receptor, when measured by BLI, is at least 1.5:1, at least 2:1, at least 5:1, at least 10:1, at least 15:1, at least 20:1, at least 25:1, at least 50:1, at least 100:1, at least 500:1, at least 10²:1, at least 5×10²:1, at least 10³:1, at least 5×10³:1, at least 10⁴:1, at least 10⁵:1, or at least 10⁶:1. In some cases, where a control TMP comprises a wild-type IL-2 polypeptide, and where a TMP of the present disclosure comprises a variant IL-2 polypeptide (comprising from 1 to 10 amino acid substitutions relative to the amino acid sequence of the wild-type IL-2 polypeptide) as the immunomodulatory polypeptide, the ratio of: i) the binding affinity of the control TMP to an IL-2 receptor (i.e., the cognate costimulatory polypeptide) to ii) the binding affinity of the TMP of the present disclosure to the IL-2 receptor, when measured by BLI, is in a range of from 1.5:1 to 10⁶:1, e.g., from 1.5:1 to 10:1, from 10:1 to 50:1, from 50:1 to 10²:1, from 10²:1 to 10³:1, from 10³:1 to 10⁴:1, from 10⁴:1 to 10⁵:1, or from 10⁵:1 to 10⁶:1.

[0085] As another example, where a control TMP comprises a wild-type CD80 polypeptide, and where a TMP of the present disclosure comprises a variant CD80 polypeptide (comprising from 1 to 10 amino acid substitutions relative to the amino acid sequence of the wild-type CD80 polypeptide) as the immunomodulatory polypeptide, the ratio of: i) the binding affinity of the control TMP to a CTLA4 polypeptide (i.e., the cognate costimulatory polypeptide) to ii) the binding affinity of the TMP of the present disclosure to the CTLA4 polypeptide, when measured by BLI, is at least 1.5:1, at least 2:1, at least 5:1, at least 10:1, at least 15:1, at least 20:1, at least 25:1, at least 50:1, at least 100:1, at least 500:1, at least 10²:1, at least 5×10²:1, at least 10³:1, at least 5×10³:1, at least 10⁴:1, at least 10⁵:1, or at least 10⁶:1.

[0086] As another example, where a control TMP comprises a wild-type CD80 polypeptide, and where a TMP of the present disclosure comprises a variant CD80 polypeptide (comprising from 1 to 10 amino acid substitutions relative to the amino acid sequence of the wild-type CD80 polypeptide) as the immunomodulatory polypeptide, the ratio of: i) the binding affinity of the control TMP to a CD28 polypeptide (i.e., the cognate costimulatory polypeptide) to ii) the binding affinity of the TMP of the present disclosure to the CD28 polypeptide, when measured by BLI, is at least 1.5:1, at least 2:1, at least 5:1, at least 10:1, at least 15:1, at least 20:1, at least 25:1, at least 50:1, at least 100:1, at least 500:1, at least 10²:1, at least 5×10²:1, at least 10³:1, at least 5×10³:1, at least 10⁴:1, at least 10⁵:1, or at least 10⁶:1.

[0087] As another example, where a control TMP comprises a wild-type 4-1BBL polypeptide, and where a TMP of the present disclosure comprises a variant 4-1BBL polypeptide (comprising from 1 to 10 amino acid substitutions relative to the amino acid sequence of the wild-type 4-1BBL polypeptide) as the immunomodulatory polypeptide, the ratio of: i) the binding affinity of the control TMP to a 4-1BB polypeptide (i.e., the cognate costimulatory polypeptide) to ii) the binding affinity of the TMP of the present disclosure to the 4-1BB polypeptide, when measured by BLI, is at least 1.5:1, at least 2:1, at least 5:1, at least 10:1, at least 15:1, at least 20:1, at least 25:1, at least 50:1, at least 100:1, at least 500:1, at least 10²:1, at least 5×10²:1, at least 10³:1, at least 5×10³:1, at least 10⁴:1, at least 10⁵:1, or at least 10⁶:1.

[0088] As another example, where a control TMP comprises a wild-type CD86 polypeptide, and where a TMP of the present disclosure comprises a variant CD86 polypeptide (comprising from 1 to 10 amino acid substitutions relative to the amino acid sequence of the wild-type CD86 polypeptide) as the immunomodulatory polypeptide, the ratio of: i) the binding affinity of the control TMP to a CD28 polypeptide (i.e., the cognate costimulatory polypeptide) to ii) the binding affinity of the TMP of the present disclosure to the CD28 polypeptide, when measured by BLI, is at least 1.5:1, at least 2:1, at least 5:1, at least 10:1, at least 15:1, at least 20:1, at least 25:1, at least 50:1, at least 100:1, at least 500:1, at least 10²:1, at least 5×10²:1, at least 10³:1, at least 5×10³:1, at least 10⁴:1, at least 10⁵:1, or at least 10⁶:1.

[0089] Binding affinity of a TMP of the present disclosure to a target T cell can be measured in the following manner: A) contacting a TMP of the present disclosure with a target T-cell expressing on its surface: i) a cognate costimulatory polypeptide that binds the parental wild-type immunomodulatory polypeptide; and ii) a T-cell receptor that substantially binds to the epitope, where the TMP comprises an epitope tag, such that the TMP binds to the target T-cell; B) contacting the target T-cell-bound TMP with a fluorescently labeled binding agent (e.g., a fluorescently labeled antibody) that binds to the epitope tag, generating a TMP/target T-cell/binding agent complex; C) measuring the mean fluorescence intensity (MFI) of the TMP/target T-cell/binding agent complex using flow cytometry. The epitope tag can be, e.g., a FLAG tag, a hemagglutinin tag, a c-myc tag, a poly(histidine) tag, etc. The MFI measured over a range of concentrations of the TMP provides a measure of the affinity. The MFI measured over a range of concentrations of the TMP provides a half maximal effective concentration (EC₅₀) of the TMP. In some cases, the EC₅₀ of a TMP of the present disclosure for a target T cell is in the nM range; and the EC₅₀, of the TMP for a control T cell (where a control T cell expresses on its surface: i) a cognate costimulatory polypeptide that binds the parental wild-type immunomodulatory polypeptide; and ii) a T-cell receptor that does not bind to the epitope present in the TMP) is in the μM range. In some cases, the ratio of the EC₅₀, of a TMP of the present disclosure for a control T cell to the EC₅₀, of the TMP for a target T cell is at least 1.5:1, at least 2:1, at least 5:1, at least 10:1, at least 15:1, at least 20:1, at least 25:1, at least 50:1, at least 100:1, at least 500:1, at least 10²:1, at least 5×10²:1, at least 10³:1, at least 5×10³:1, at least 10⁴:1, at lease 10⁵:1, or at least 10⁶:1. The ratio of the EC₅₀ of a TMP of the present disclosure for a control T cell to the EC₅₀, of the TMP for a target T cell is an expression of the selectivity of the TMP.

[0090] In some cases, when measured as described in the preceding paragraph, a TMP of the present disclosure comprising a reduced-affinity MOD exhibits selective binding to target T-cell, compared to binding of the TMP to a control T cell that comprises: i) the cognate costimulatory polypeptide that binds the parental wild-type MOD; and ii) a T-cell receptor that substantially binds to an epitope other than the epitope present in the TMP.

### KRAS Peptides

[0091] As discussed above, a TMP of the present disclosure comprises a KRAS peptide that is typically at least about 4 amino acids in length, and presents a KRAS epitope to a T cell when in an MHC/peptide complex (e.g., an HLA/peptide complex).

[0092] A KRAS peptide present in a TMP of the present disclosure can have a length of at least 4 amino acids, e.g., from 4 amino acids to about 25 amino acids in length (e.g., 4 amino acids (aa), 5 aa, 6 aa, 7 aa, 8 aa, 9 aa, 10 aa, 11 aa, 12 aa, 13 aa, 14 aa, 15 aa, 16 aa, 17 aa, 18 aa, 19 aa, 20 aa, 21 aa, 22 aa, 23 aa, 24 aa, or 25 aa, including within a range of 9-10 amino acids, from 4 to 20 amino acids, from 6 to 18 amino acids, from 8 to 15 amino acids, from 8 to 12 amino acids, from 5 to 10 amino acids, from 10 to 20 amino acids, and from 15 to 25 amino acids in length). In some cases, a KRAS peptide is 9 amino acids or 10 amino acids in length.

[0093] A KRAS epitope present in a TMP of the present disclosure is a peptide specifically bound by a T-cell, i.e., the epitope is specifically bound by an epitope-specific T cell, i.e., a T cell having a TCR that is specific for the KRAS epitope. An epitope-specific T cell binds an epitope having a reference amino acid sequence, but does not substantially bind an epitope that differs from the reference amino acid sequence. For example, an epitope-specific T cell binds an epitope having a reference amino acid sequence, and binds an epitope that differs from the reference amino acid sequence, if at all, with an affinity that is less than 10⁻⁶ M, less than 10⁻⁵ M, or less than 10 M. An epitope-specific T cell can bind an epitope for which it is specific with an affinity of at least 10⁻⁷ M, at least 10⁻⁸ M, at least 10⁻⁹ M, or at least 10⁻¹⁰ M.

[0094] In some cases, a suitable KRAS peptide is a peptide of at least 4 amino acids in length, e.g., from 4 amino acids to about 25 amino acids (e.g., 4 amino acids (aa), 5 aa, 6 aa, 7 aa, 8 aa, 9 aa, 10 aa, 11 aa, 12 aa, 13 aa, 14 aa, 15 aa, 16 aa, 17 aa, 18 aa, 19 aa, 20 aa, 21 aa, 22 aa, 23 aa, 24 aa, or 25 aa, including within a range of 9-10 amino acids, from 4 to 20 amino acids, from 6 to 18 amino acids, from 8 to 15 amino acids, from 8 to 12 amino acids, from 5 to 10 amino acids, from 10 to 20 amino acids, and from 15 to 25 amino acids in length) of a KRAS polypeptide comprising an amino acid sequence having at least 80%, at least 85%, at least 90%, at least 95%, at least 98%, or at least 99%, amino acid sequence identity to one of the following KRAS amino acid sequences:

[0095] (A) [sequence omitted] (SEQ ID NO:1), where the KRAS polypeptide comprises one or more (e.g., 1, 2, 3, 4, or 5) amino acid substitutions compared to the amino acid sequence forth in SEQ ID NO:1, and where the one or more amino acid substitutions can include substitutions associated with cancer; e.g., substitutions that are found in a KRAS polypeptide in a cancer cell;

[0096] (B) [sequence omitted] (SEQ ID NO:2), where the KRAS polypeptide comprises one or more (e.g., 1, 2, 3, 4, or 5) amino acid substitutions compared to the amino acid sequence forth in SEQ ID NO:1, and where the one or more amino acid substitutions can include substitutions associated with cancer; e.g., substitutions that are found in a KRAS polypeptide in a cancer cell; and

[0097] (C) MTEY(X1)L(X2)(X3)(X4)GA(X5)(X6)VGKSALT IQLIQNHFVD EYDPTIEDSY RKQVVIDGET CLWDILDTAG QEEYSAMRDQ YMRTGEGFLC VFAINNTKSF EDIHHYREQI KRVKDSEDVP MVLVGNKCDL PSRTVDTKQA QDLARSYGIP FIETSAKTRQ GVDDAFYTLV REIRKHKEKM SKDGKKKKKK SKTKCVIM (SEQ ID NO:89), where X1 is Lys, Phe, or Leu; X2 is Val or Leu; X3 is Val or Thr; X4 is Val or Thr; X5 is Gly, Asp, Cys, Val, or Ser; and X6 is Gly, Cys, or Asp; where one or both of X5 and X6 is not a Cys.

[0098] Non-limiting examples of suitable KRAS peptides include peptides comprising a sequence selected from the group consisting of VVGADGVGK (SEQ ID NO:176), VVGACGVGK (SEQ ID NO:177), VVGAVGVGK (SEQ ID NO:178), VVVGADGVGK (SEQ ID NO:179), VVVGAVGVGK (SEQ ID NO:180), VVVGACGVGK (SEQ ID NO:181), VTGADGVGK (SEQ ID NO:182), VTGAVGVGK (SEQ ID NO:183), VTGACGVGK (SEQ ID NO:184), VTVGADGVGK (SEQ ID NO:185), VTVGAVGVGK (SEQ ID NO:186), and VTVGACGVGK (SEQ ID NO:187); where the KRAS peptide has a length of 9 amino acids or 10 amino acids, or a length of at least 9 amino acids or 10 amino acids.

[0099] Additional non-limiting examples of suitable KRAS peptides include peptides comprising a sequence selected from the group consisting of: VVVGAGDVGK (SEQ ID NO:188); VVGAGDVGK (SEQ ID NO:189); VVVGARGVGK (SEQ ID NO:190); and VVGARGVGK (SEQ ID NO:191); where the KRAS peptide has a length of 9 amino acids or 10 amino acids, or a length of at least 9 amino acids or 10 amino acids.

[0100] Non-limiting examples of suitable KRAS peptides include peptides comprising a sequence selected from the group consisting of LVVVGADGV (SEQ ID NO:192), LVVVGAVGV (SEQ ID NO:193), LVVVGACGV (SEQ ID NO:194), KLVVVGADGV (SEQ ID NO:195), KLVVVGAVGV (SEQ ID NO:196), KLVVVGACGV (SEQ ID NO:197), LLVVGADGV (SEQ ID NO:198), LLVVGAVGV (SEQ ID NO:199), LLVVGACGV (SEQ ID NO:200), FLVVVGADGV (SEQ ID NO:201), FLVVVGAVGV (SEQ ID NO:202), and FLVVVGACGV (SEQ ID NO:203); where the KRAS peptide has a length of 9 amino acids or 10 amino acids, or a length of at least 9 amino acids or 10 amino acids.

[0101] Additional non-limiting examples of suitable KRAS peptides include peptides comprising a sequence selected from the group consisting of: KLVVVGAGDV (SEQ ID NO:204); and KLVVVGARGV (SEQ ID NO:205); where the KRAS peptide has a length of 9 amino acids or 10 amino acids, or a length of at least 9 amino acids or 10 amino acids.

[0102] Additional non-limiting examples of suitable KRAS peptides include peptides comprising a sequence selected from the group consisting of: GAGDVGKSAL (SEQ ID NO:206); AGDVGKSAL (SEQ ID NO:207); DVGKSALTI (SEQ ID NO:208); GAVGVGKSAL (SEQ ID NO:209); AVGVGKSAL (SEQ ID NO:210); YKLVVVGAV (SEQ ID NO:211); ARGVGKSAL (SEQ ID NO:212); GARGVGKSAL (SEQ ID NO:213); EYKLVVVGAR (SEQ ID NO:214); RGVGKSALTI (SEQ ID NO:215); LVVVGARGV (SEQ ID NO:216); GADGVGKSAL (SEQ ID NO:217); ACGVGKSAL (SEQ ID NO:218); and GACGVGKSAL (SEQ ID NO:219); where the KRAS peptide has a length of 9 amino acids or 10 amino acids, or a length of at least 9 amino acids or 10 amino acids.

[0103] In some cases, a TMP of the present disclosure modulates the activity of a T cell that comprises a TCR that is specific for a G12V form of a KRAS polypeptide, as described above. In such cases, the KRAS peptide present in a TMP of the present disclosure can comprise, e.g., one of the following amino acid sequences: VVGAVGVGK (SEQ ID NO: 178), VVVGAVGVGK (SEQ ID NO:180), VGAVGVGKS (SEQ ID NO:222), VGAVGVGKSA (SEQ ID NO:223), AVGVGKSAL (SEQ ID NO:210), AVGVGKSALT (SEQ ID NO:225), GAVGVGKSAL (SEQ ID NO:209), GAVGVGKSA (SEQ ID NO:227), LVVVGAVGVG (SEQ ID NO:228), LVVVGAVGV (SEQ ID NO:193), KLVVVGAVGV (SEQ ID NO:196), and KLVVVGAVG (SEQ ID NO:231); where the KRAS peptide has a length of 9 amino acids or 10 amino acids, or a length of at least 9 amino acids or 10 amino acids.

[0104] In some cases, the KRAS peptide present in a TMP of the present disclosure presents an epitope specific to an HLA-A, -B, -C, -E, -F, or -G allele. In an embodiment, the KRAS peptide present in a TMP presents an epitope restricted to HLA-A*0101, A*0201, A*0203, A*0301, A*1101, A*2301, A*2402, A*2407, A*3101, A*3303, A*3401, and/or A*6801. In an embodiment, the KRAS epitope peptide present in a TMP presents an epitope restricted to HLA-B*0702, B*0801, B*1502, B*2705, B*3802, B*3802, B*3901, B*3902, B*4001, B*4601, B*5101, and/or B*5301. In an embodiment, the KRAS epitope peptide present in a TMP presents an epitope restricted to C*0102, C*0303, C*0304, C*0401, C*0602, C*0701, C*702, C*0801, and/or C*1502.

[0105] As non-limiting examples, KRAS peptides comprising a peptide selected from the group consisting of VVGADGVGK (SEQ ID NO: 176), VVGACGVGK (SEQ ID NO:177), VVGAVGVGK (SEQ ID NO: 178), VVVGADGVGK (SEQ ID NO:179), VVVGAVGVGK (SEQ ID NO:180), VVVGACGVGK (SEQ ID NO:181), VTGADGVGK (SEQ ID NO:182), VTGAVGVGK (SEQ ID NO:183), VTGACGVGK (SEQ ID NO:184), VTVGADGVGK (SEQ ID NO:185), VTVGAVGVGK (SEQ ID NO:186), VTVGACGVGK (SEQ ID NO:187), VVVGAGDVGK (SEQ ID NO:188), VVGAGDVGK (SEQ ID NO:189), VVVGARGVGK (SEQ ID NO:190), and VVGARGVGK (SEQ ID NO:191), where the KRAS peptide has a length of 9 amino acids or 10 amino acids, or a length of at least 9 amino acids or 10 amino acids, present an epitope when bound to an HLA complex comprising a β2M polypeptide and an A*1101 HLA-A heavy chain. Such peptides may also be presented in complex with an HLA complex comprising a β2M polypeptide and an A*6801 HLA-A heavy chain.

[0106] As non-limiting examples, KRAS peptides comprising a peptide selected from the group consisting of LVVVGADGV (SEQ ID NO:192), LVVVGAVGV (SEQ ID NO:193), LVVVGACGV (SEQ ID NO:194), KLVVVGADGV (SEQ ID NO:195), KLVVVGAVGV (SEQ ID NO:196), KLVVVGACGV (SEQ ID NO:197), LLVVGADGV (SEQ ID NO:198), LLVVGAVGV (SEQ ID NO:199), LLVVGACGV (SEQ ID NO:200), FLVVVGADGV (SEQ ID NO:201), FLVVVGAVGV (SEQ ID NO:202), and FLVVVGACGV (SEQ ID NO:203) where the KRAS peptide has a length of 9 amino acids or 10 amino acids, or a length of at least 9 amino acids or 10 amino acids, present an epitope when bound to an HLA complex comprising a β2M polypeptide and an A*0201 HLA-A heavy chain.

[0107] As additional examples, the following KRAS peptides can present an epitope when bound to an HLA complex comprising a β2M polypeptide and an HLA-A heavy chain as follows: GAGDVGKSAL (SEQ ID NO:206), which can present an epitope when bound to an HLA complex comprising a β2M polypeptide and a B*3801 HLA-A heavy chain; AGDVGKSAL (SEQ ID NO:207), which can present an epitope when bound to an HLA complex comprising a β2M polypeptide and a B0702, a B*3801, or a B*3901 HLA-A heavy chain; DVGKSALTI (SEQ ID NO:208), which can present an epitope when bound to an HLA complex comprising a β2M polypeptide and a B*5101 HLA-A heavy chain; GAVGVGKSAL (SEQ ID NO:209), which can present an epitope when bound to an HLA complex comprising a β2M polypeptide and a B*0702 or a B*3801 HLA-A heavy chain; AVGVGKSAL (SEQ ID NO:210), which can present an epitope when bound to an HLA complex comprising a β2M polypeptide and a B*0702 HLA-A heavy chain; YKLVVVGAV (SEQ ID NO:211), which can present an epitope when bound to an HLA complex comprising a β2M polypeptide and an A*0203 or a B*3902 HLA-A heavy chain; ARGVGKSAL (SEQ ID NO:212), which can present an epitope when bound to an HLA complex comprising a β2M polypeptide and a B*0702, a B*2705, or a B*3901 HLA-A heavy chain; GARGVGKSAL (SEQ ID NO:213), which can present an epitope when bound to an HLA complex comprising a β2M polypeptide and a B*0702 HLA-A heavy chain; EYKLVVVGAR (SEQ ID NO:214), which can present an epitope when bound to an HLA complex comprising a β2M polypeptide and an A*3101 HLA-A heavy chain; RGVGKSALTI (SEQ ID NO:215), which can present an epitope when bound to an HLA complex comprising a β2M polypeptide and a B*0702 HLA-A heavy chain; LVVVGARGV (SEQ ID NO:216), which can present an epitope when bound to an HLA complex comprising a β2M polypeptide and an A*0203 HLA-A heavy chain; GADGVGKSAL (SEQ ID NO:217), which can present an epitope when bound to an HLA complex comprising a β2M polypeptide and a B*3801 HLA-A heavy chain; ACGVGKSAL (SEQ ID NO:218), which can present an epitope when bound to an HLA complex comprising a β2M polypeptide and a B*0702 HLA-A heavy chain; and GACGVGKSAL (SEQ ID NO:219), which can present an epitope when bound to an HLA complex comprising a β2M polypeptide and a B*3801 HLA-A heavy chain.

### MHC Polypeptides

[0108] As noted above, a TMP of the present disclosure includes MHC polypeptides. For the purposes of the instant disclosure, the term “major histocompatibility complex (MHC) polypeptides” is meant to include MHC polypeptides of various species, including human MHC (also referred to as human leukocyte antigen (HLA)) polypeptides, rodent (e.g., mouse, rat, etc.) MHC polypeptides, and MHC polypeptides of other mammalian species (e.g., lagomorphs, non-human primates, canines, felines, ungulates (e.g., equines, bovines, ovines, caprines, etc.), and the like. The term “MHC polypeptide” is meant to include Class I MHC polypeptides (e.g., β-2 microglobulin and MHC class I heavy chain).

[0109] In some cases, the first MHC polypeptide is an MHC class I β2M (β2M) polypeptide, and the second MHC polypeptide is an MHC class I heavy chain (H chain) (“MHC-H”)). In other instances, the first MHC polypeptide is an MHC class I heavy chain polypeptide; and the second MHC polypeptide is a β2M polypeptide. In some cases, both the β2M and MHC-H chain are of human origin; i.e., the MHC-H chain is an HLA heavy chain, or a variant thereof. Unless expressly stated otherwise, a TMP of the present disclosure does not include membrane anchoring domains (transmembrane regions) of an MHC class I heavy chain, or a part of MHC class I heavy chain sufficient to anchor the resulting TMP to a cell (e.g., eukaryotic cell such as a mammalian cell) in which it is expressed. In some cases, the MHC class I heavy chain present in a TMP of the present disclosure does not include a signal peptide, a transmembrane domain, or an intracellular domain (cytoplasmic tail) associated with a native MHC class I heavy chain. Thus, e.g., in some cases, the MHC class I heavy chain present in a TMP of the present disclosure includes only the α1, α2, and α3 domains of an MHC class I heavy chain. In some cases, the MHC class I heavy chain present in a TMP of the present disclosure has a length of from about 270 amino acids (aa) to about 290 aa. In some cases, the MHC class I heavy chain present in a TMP of the present disclosure has a length of 270 aa, 271 aa, 272 aa, 273 aa, 274 aa, 275 aa, 276 aa, 277 aa, 278 aa, 279 aa, 280 aa, 281 aa, 282 aa, 283 aa, 284 aa, 285 aa, 286 aa, 287 aa, 288 aa, 289 aa, or 290 aa.

[0110] In some cases, an MHC polypeptide of a TMP is a human MHC polypeptide, where human MHC polypeptides are also referred to as “human leukocyte antigen” (“HLA”) polypeptides. In some cases, an MHC polypeptide of a TMP is a Class I HLA polypeptide, e.g., β2-microglobulin polypeptide, or a Class I HLA heavy chain polypeptide. Class I HLA heavy chain polypeptides include HLA-A heavy chain polypeptides, HLA-B heavy chain polypeptides, HLA-C heavy chain polypeptides, HLA-E heavy chain polypeptides, HLA-F heavy chain polypeptides, and HLA-G heavy chain polypeptides.

[0111] MHC Class I Heavy Chains

[0112] In some cases, an MHC class I heavy chain polypeptide present in a TMP of the present disclosure comprises an amino acid sequence having at least 75%, at least 80%, at least 85%, at least 90%, at least 95%, at least 98%, at least 99%, or 100%, amino acid sequence identity to all or part (e.g., 50, 75, 100, 150, 200, or 250 contiguous amino acids) of the amino acid sequence of any of the human HLA heavy chain polypeptides depicted in FIGS. 7-13. In some cases, the MHC class I heavy chain has a length of 270 aa, 271 aa, 272 aa, 273 aa, 274 aa, 275 aa, 276 aa, 277 aa, 278 aa, 279 aa, 280 aa, 281 aa, 282 aa, 283 aa, 284 aa, 285 aa, 286 aa, 287 aa, 288 aa, 289 aa, or 290 aa. In some cases, an MHC class I heavy chain polypeptide present in a TMP of the present disclosure comprises 1-30, 1-5, 5-10, 10-15, 15-20, 20-25 or 25-30 amino acid insertions, deletions, and/or substitutions (in addition to those locations indicated as being variable in the heavy chain consensus sequences) of any one of the amino acid sequences depicted in FIGS. 7-13. In some cases, the MHC class I heavy chain does not include transmembrane or cytoplasmic domains. As an example, a MHC class I heavy chain polypeptide of a TMP of the present disclosure can comprise an amino acid sequence having at least 75%, at least 80%, at least 85%, at least 90%, at least 95%, at least 98%, at least 99%, or 100%, amino acid sequence identity to amino acids 25-300 (lacking all, or substantially all, of the leader, transmembrane and cytoplasmic sequence) or amino acids 25-365 (lacking the leader) of a human HLA-A heavy chain polypeptides depicted in any one of FIGS. 5A, 5B, and 5C.

[0113] FIGS. 5A, 5B and 5C provide amino acid sequences of human leukocyte antigen (HLA) Class I heavy chain polypeptides. Signal sequences, amino acids 1-24, are bolded and underlined. FIG. 5A entry: 3A.1 is the HLA-A heavy chain (HLA-A*01:01:01:01 or A*0101) (NCBI accession NP_001229687.1), SEQ ID NO:35; entry 3A.2 is from HLA-A*1101 SEQ ID NO:36; entry 3A.3 is from HLA-A*2402 SEQ ID NO:37 and entry 3A.4 is from HLA-A*3303 SEQ ID NO:38. FIG. 5B provides the sequence HLA-B*07:02:01 (HLA-B*0702) NCBI GenBank Accession NP_005505.2 (see also GenBank Accession AUV50118.1.). FIG. 5C provides the sequence HLA-C*0701 (GenBank Accession NP_001229971.1) (HLA-C*07:01:01:01 or HLA-Cw*070101, HLA-Cw*07 see GenBank Accession CAO78194.1).

[0114] As mentioned above, the first and second polypeptides of a heterodimeric TMP typically will comprise one or more disulfide bonds to provide the TMP with improved stability and/or improved expression. The one or more disulfide bonds can be formed between Cys residues that are provided in the same polypeptide, i.e., intrachain disulfide bonds. Alternatively, or in addition to such intra-chain disulfide bonds, one or more interchain disulfide bonds can be formed between Cys residues that are provided in the first and second polypeptides, e.g., (i) non-naturally occurring Cys residues can be provided in both of the MHC class I polypeptides, i.e., the β2M polypeptide and MHC class I heavy chain polypeptide, and/or (ii) a linker comprising a Cys residue can be provided in both of the first and second polypeptides, and/or (iii) a linker comprising a Cys residue can be provided in one of the first and second polypeptides (e.g., between the epitope and β2M in the first polypeptide) and a non-naturally occurring Cys residue can be provided in the other MHC class I polypeptide (e.g., in the MHC class I heavy chain polypeptide). Exemplary configurations are discussed below.

[0115] FIG. 6 provides an alignment of eleven mature MHC class I heavy chain amino acid sequences without their leader sequences or transmembrane domains or intracellular domains. The aligned sequences are human HLA-A, HLA-B, and HLA-C, a mouse H2K protein sequence, three variants of HLA-A (var.1, var. 2C, and var.2CP), and 3 human HLA-A variants (HLA-A*1101; HLA-A*2402; and HLA-A*3303). Indicated in the alignment are the locations (84 and 139 of the mature proteins) where cysteine residues may be introduced (e.g., by substitution) for the formation of a disulfide bond to stabilize the MHC H chain-β2M complex. Also shown in the alignment is position 236 (of the mature polypeptide), which may be substituted by a cysteine residue that can form an inter-chain disulfide bond with β2M (e.g., at aa 12). An arrow appears above each of those locations and the residues are bolded. The seventh HLA-A sequence shown in the alignment (var. 2c), shows the sequence of variant 2 substituted with C residues at positions 84, 139 and 236. The boxes flanking residues 84, 139 and 236 show the groups of five amino acids on either sides of those six sets of five residues, denoted aac1 (for “amino acid cluster 1”), aac2 (for “amino acid cluster 2”), aac3 (for “amino acid cluster 3”), aac4 (for “amino acid cluster 4”), aac5 (for “amino acid cluster 5”), and aac6 (for “amino acid cluster 6”), that may be replaced by 1 to 5 amino acids selected independently from (i) any naturally occurring amino acid or (ii) any naturally occurring amino acid except proline or glycine.

[0116] With regard to FIG. 6, in some cases: i) aac1 (amino acid cluster 1) may be the amino acid sequence GTLRG (SEQ ID NO:98) or that sequence with one or two amino acids deleted or substituted with other naturally occurring amino acids (e.g., L replaced by I, V, A or F); ii) aac2 (amino acid cluster 2) may be the amino acid sequence YNQSE (SEQ ID NO:99) or that sequence with one or two amino acids deleted or substituted with other naturally occurring amino acids (e.g., N replaced by Q, Q replaced by N, and/or E replaced by D); iii) aac3 (amino acid cluster 3) may be the amino acid sequence TAADM (SEQ ID NO:100) or that sequence with one or two amino acids deleted or substituted with other naturally occurring amino acids (e.g., T replaced by S, A replaced by G, D replaced by E, and/or M replaced by L, V, or I); iv) aac4 (amino acid cluster 4) may be the amino acid sequence AQTTK (SEQ ID NO:101) or that sequence with one or two amino acids deleted or substituted with other naturally occurring amino acids (e.g., A replaced by G, Q replaced by N, or T replaced by S, and/or K replaced by R or Q); v) aac5 (amino acid cluster 5) may be the amino acid sequence VETRP (SEQ ID NO:102) or that sequence with one or two amino acids deleted or substituted with other naturally occurring amino acids (e.g., V replaced by I or L, E replaced by D, T replaced by S, and/or R replaced by K); and/or vi) aac6 (amino acid cluster 6) may be the amino acid sequence GDGTF (SEQ ID NO:103) or that sequence with one or two amino acids deleted or substituted with other naturally occurring amino acids (e.g., D replaced by E, T replaced by S, or F replaced by L, W, or Y).

[0117] FIGS. 7-9 provide alignments of mature HLA class I heavy chain amino acid sequences (without leader sequences or transmembrane domains or intracellular domains). The aligned amino acid sequences in FIG. 7A are HLA-A class I heavy chains of the following alleles: A*0101, A*0201, A*0301, A*1101, A*2301, A*2402, A*2407, A*3303, and A*3401. The aligned amino acid sequences in FIG. 8A are HLA-B class I heavy chains of the following alleles: B*0702, B*0801, B*1502, B*3802, B*4001, B*4601, and B*5301. The aligned amino acid sequences in FIG. 9A are HLA-C class I heavy chains of the following alleles: C*0102, C*0303, C*0304, C*0401, C*0602, C*0701, C*0801, and C*1502. Indicated in the alignments are the locations (84 and 139 of the mature proteins) where cysteine residues may be introduced (e.g., by substitution) for the formation of a disulfide bond to stabilize the HLA H chain-β2M complex. Also shown in the alignment is position 236 (of the mature polypeptide), which may be substituted by a cysteine residue that can form an inter-chain disulfide bond with β2M (e.g., at aa 12). The boxes flanking residues 84, 139 and 236 show the groups of five amino acids on either sides of those six sets of five residues, denoted aac1 (for “amino acid cluster 1”), aac2 (for “amino acid cluster 2”), aac3 (for “amino acid cluster 3”), aac4 (for “amino acid cluster 4”), aac5 (for “amino acid cluster 5”), and aac6 (for “amino acid cluster 6”), that may be replaced by 1 to 5 amino acids selected independently from (i) any naturally occurring amino acid or (ii) any naturally occurring amino acid except proline or glycine.

[0118] FIGS. 7A, 8A, and 9A provide alignments of the amino acid sequences of mature HLA-A, -B, and -C class I heavy chains, respectively. The sequences are provided for the extracellular portion of the mature protein (without leader sequences or transmembrane domains or intracellular domains). As described in FIG. 6, the positions of aa residues 84, 139, and 236 and their flanking residues (aac1 to aac6) that may be replaced by 1 to 5 amino acids selected independently from (i) any naturally occurring amino acid or (ii) any naturally occurring amino acid except proline or glycine ae also shown. FIGS. 7B, 8B, and 9B provide consensus amino acid sequences for the HLA-A, -B, and -C sequences, respectively, provide in FIGS. 7A, 8A, and 9A. The consensus sequences show the variable amino acid positions as “X” residues sequentially numbered and the locations of amino acids 84, 139 and 236 double underlined.

[0119] With regard to FIG. 7A, in some cases: i) aac1 (amino acid cluster 1) may be the amino acid sequence GTLRG (SEQ ID NO:98) or that sequence with one or two amino acids deleted or substituted with other naturally occurring amino acids (e.g., L replaced by I, V, A or F); ii) aac2 (amino acid cluster 2) may be the amino acid sequence YNQSE (SEQ ID NO:99) or that sequence with one or two amino acids deleted or substituted with other naturally occurring amino acids (e.g., N replaced by Q, Q replaced by N, and/or E replaced by D); iii) aac3 (amino acid cluster 3) may be the amino acid sequence TAADM (SEQ ID NO:100) or that sequence with one or two amino acids deleted or substituted with other naturally occurring amino acids (e.g., T replaced by S, A replaced by G, D replaced by E, and/or M replaced by L, V, or I); iv) aac4 (amino acid cluster 4) may be the amino acid sequence AQTTK (SEQ ID NO:101) or that sequence with one or two amino acids deleted or substituted with other naturally occurring amino acids (e.g., A replaced by G, Q replaced by N, or T replaced by S, and or K replaced by R or Q); v) aac5 (amino acid cluster 5) may be the amino acid sequence VETRP (SEQ ID NO:102) or that sequence with one or two amino acids deleted or substituted with other naturally occurring amino acids (e.g., V replaced by I or L, E replaced by D, T replaced by S, and/or R replaced by K); and/or vi) aac6 (amino acid cluster 6) may be the amino acid sequence GDGTF (SEQ ID NO:103) or that sequence with one or two amino acids deleted or substituted with other naturally occurring amino acids (e.g., D replaced by E, T replaced by S, or F replaced by L, W, or Y).

[0120] With regard to FIG. 8A, in some cases: i) aac1 (amino acid cluster 1) may be the amino acid sequence RNLRG (SEQ ID NO:104) or that sequence with one or two amino acids deleted or substituted with other naturally occurring amino acids (e.g., N replaced by T or I; and/or L replaced by A; and/or the second R replaced by L; and/or the G replaced by R); ii) aac2 (amino acid cluster 2) may be the amino acid sequence YNQSE (SEQ ID NO:99) or that sequence with one or two amino acids deleted or substituted with other naturally occurring amino acids (e.g., N replaced by Q, Q replaced by N, and/or E replaced by D); iii) aac3 (amino acid cluster 3) may be the amino acid sequence TAADT (SEQ ID NO:105) or that sequence with one or two amino acids deleted or substituted with other naturally occurring amino acids (e.g., the first T replaced by S; and/or A replaced by G; and/or D replaced by E; and/or the second T replaced by S); iv) aac4 (amino acid cluster 4) may be the amino acid sequence AQITQ (SEQ ID NO:106) or that sequence with one or two amino acids deleted or substituted with other naturally occurring amino acids (e.g., A replaced by G; and/or the first Q replaced by N; and/or I replaced by L or V; and/or the T replaced by S; and/or the second Q replaced by N); v) aac5 (amino acid cluster 5) may be the amino acid sequence VETRP (SEQ ID NO:102) or that sequence with one or two amino acids deleted or substituted with other naturally occurring amino acids (e.g., V replaced by I or L, E replaced by D, T replaced by S, and/or R replaced by K); and/or vi) aac6 (amino acid cluster 6) may be the amino acid sequence GDRTF (SEQ ID NO:107) or that sequence with one or two amino acids deleted or substituted with other naturally occurring amino acids (e.g., D replaced by E; and/or T replaced by S; and/or R replaced by K or H; and/or F replaced by L, W, or Y).

[0121] With regard to FIG. 9A, in some cases: i) aac1 (amino acid cluster 1) may be the amino acid sequence RNLRG (SEQ ID NO:104) or that sequence with one or two amino acids deleted or substituted with other naturally occurring amino acids (e.g., N replaced by K; and/or L replaced by A or I; and/or the second R replaced by H; and/or the G replaced by T or S); ii) aac2 (amino acid cluster 2) may be the amino acid sequence YNQSE (SEQ ID NO:99) or that sequence with one or two amino acids deleted or substituted with other naturally occurring amino acids (e.g., N replaced by Q, Q replaced by N, and/or E replaced by D); iii) aac3 (amino acid cluster 3) may be the amino acid sequence TAADT (SEQ ID NO:105) or that sequence with one or two amino acids deleted or substituted with other naturally occurring amino acids (e.g., the first T replaced by S; and/or A replaced by G; and/or D replaced by E; and/or the second T replaced by S); iv) aac4 (amino acid cluster 4) may be the amino acid sequence AQITQ (SEQ ID NO:106) or that sequence with one or two amino acids deleted or substituted with other naturally occurring amino acids (e.g., A replaced by G; and/or the first Q replaced by N; and/or I replaced by L; and/or the second Q replaced by N or K); v) aac5 (amino acid cluster 5) may be the amino acid sequence VETRP (SEQ ID NO:102) or that sequence with one or two amino acids deleted or substituted with other naturally occurring amino acids (e.g., V replaced by I or L, E replaced by D, T replaced by S, and/or R replaced by K or H); and/or vi) aac6 (amino acid cluster 6) may be the amino acid sequence GDGTF (SEQ ID NO:103) or that sequence with one or two amino acids deleted or substituted with other naturally occurring amino acids (e.g., D replaced by E; and/or T replaced by S; and/or F replaced by L, W, or Y).

[0122] HLA-A

[0123] In some cases, a TMP of the present disclosure comprises an HLA-A heavy chain polypeptide. The HLA-A heavy chain peptide sequences, or portions thereof, that may be that may be incorporated into a TMP of the present disclosure include, but are not limited to, the alleles: A*0101, A*0201, A*0301, A*1101, A*2301, A*2402, A*2407, A*3303, and A*3401, which are aligned without all, or substantially all, of the leader, transmembrane and cytoplasmic sequences in FIG. 7A. Any of those alleles may comprise a mutation at one or more of positions 84, 139 and/or 236 (as shown in FIG. 7A) selected from: a tyrosine to alanine at position 84 (Y84A); a tyrosine to cysteine at position 84 (Y84C); an alanine to cysteine at position 139 (A139C); and an alanine to cysteine substitution at position 236 (A236C). In addition, HLA-A sequence having at least 75% (e.g., at least 80%, at least 85%, at least 90%, at least 95%, at least 98%, at least 99%) or 100% amino acid sequence identity to all or part (e.g., 50, 75, 100, 150, 200, or 250 contiguous amino acids) of the sequence of those HLA-A alleles may also be employed (e.g., it may comprise 1-25, 1-5, 5-10, 10-15, 15-20, 20-25, or 25-30 amino acid insertions, deletions, and/or substitutions). A TMP of the present disclosure can comprise an MHC class I heavy chain comprising the amino acid sequence depicted in any one of FIGS. 21A-21AA, 21DD-21FF; 21HH, and 22A-22BB.

[0124] In some cases, a TMP of the present disclosure comprises an HLA-A heavy chain polypeptide comprising the HLA-A consensus amino acid sequence shown in FIG. 21II (SEQ ID NO:61), wherein X1 is F, Y, S, or T; X2 is K or R; X3 is Q, G, E, or R; X4 is N or E; X5 is R or G; X6 is N or K; X7 is M or V; X8 is H or Q; X9 is T or I; X10 is D or H; X11 is A, V, or E; X12 is N or D; X13 is G or R; X1_4 is T or I; X15 is L or A; X16 is R or L; X17 is G or R; X18 is A or D; X19 is I, L, or V; X20 is I, R or M; X21 is F or Y; X22 is S or P; X23 is W or G; X24 is R, H, or Q; X25 is D or Y; X26 is N or K; X27 is T or 1; X28 is K or Q; X29 is R or H; X30 is A or T; X31 is A or V; X32 is H or R; X33 is R, L, Q, or W; X34 is V or A; X35 is D or E; X36 is R or T; X37 is D or E; X38 is W or G; X39 is P or A; X40 is P or A; X41 is V or I; X42 is S or G; X43 is A or S; X44 is Q or E; and X45 is P or L.

[0125] As one example, an MHC class I heavy chain polypeptide of a TMP can comprise an amino acid sequence having at least 75%, at least 80%, at least 85%, at least 90%, at least 95%, at least 98%, at least 99%, or 100%, amino acid sequence identity to a human HLA-A heavy chain amino acid sequence shown in FIG. 21A (SEQ ID NO:108) or 21B (SEQ ID NO:109). The HLA-A heavy chain polypeptide of FIG. 21B is also referred to as “HLA-A*0201” or simply “HLA-A02.” In some cases, the C-terminal Pro is not included in a TMP of the present disclosure. For example, in some cases, an HLA-A02 polypeptide suitable for inclusion in a TMP of the present disclosure comprises at least 75%, at least 80%, at least 85%, at least 90%, at least 95%, at least 98%, at least 99%, or 100%, amino acid sequence identity to the amino acid sequence shown in FIG. 21C (SEQ ID NO:110).

[0126] HLA-A (Y84A; A236C)

[0127] In some cases, the MHC class I heavy chain polypeptide comprises Y84A and A236C substitutions. For example, in some cases, the MHC class I heavy chain polypeptide comprises an amino acid sequence having at least 75%, at least 80%, at least 85%, at least 90%, at least 95%, at least 98%, at least 99%, or 100%, amino acid sequence identity to the human HLA-A heavy chain (Y84A; A236C) amino acid sequence shown in FIG. 21D (SEQ ID NO:111), where amino acid 84 is Ala and amino acid 236 is Cys. In some cases, the Cys-236 forms an interchain disulfide bond with Cys-12 of a variant β2M polypeptide that comprises an R12C substitution.

[0128] In some cases, an HLA-A heavy chain polypeptide suitable for inclusion in a TMP of the present disclosure is an HLA-A02 (Y84A; A236C) polypeptide comprising the amino acid sequence in FIG. 21E (SEQ ID NO:112). In some cases, an HLA-A heavy chain polypeptide suitable for inclusion in a TMP of the present disclosure is an HLA-A02 (Y84A; A236C) polypeptide comprising the amino acid sequence shown in FIG. 21F (SEQ ID NO:113).

[0129] HLA-A (Y84C; A139C)

[0130] In some cases, the MHC class I heavy chain polypeptide comprises Y84C and A139C substitutions. For example, in some cases, the MHC class I heavy chain polypeptide comprises an amino acid sequence having at least 75%, at least 80%, at least 85%, at least 90%, at least 95%, at least 98%, at least 99%, or 100%, amino acid sequence identity to the human HLA-A heavy chain (Y84C; A139C) amino acid sequence shown in FIG. 21G (SEQ ID NO:114), where amino acid 84 is Cys and amino acid 139 is Cys. In some cases, Cys-84 forms an intrachain disulfide bond with Cys-139.

[0131] HLA-A (Y84C; A139C; A236C)

[0132] In some cases, a MHC class I heavy chain polypeptide suitable for inclusion in a TMP of the present disclosure comprises an amino acid sequence having at least 75%, at least 80%, at least 85%, at least 90%, at least 95%, at least 98%, at least 99%, or 100%, amino acid sequence identity to the human HLA-A heavy chain (Y84C; A139C; A236C) amino acid sequence shown in FIG. 21H (SEQ ID NO:120), where amino acid 84 is Cys, amino acid 139 is Cys, and amino acid 236 is Cys. In some cases, Cys-84 forms an intrachain disulfide bond with Cys-139. The Cys at amino acid 236 can form a disulfide bond with a Cys residue in a second polypeptide chain. For example, the Cys at amino acid 236 can form a disulfide bond with the Cys-12 residue in a β2M polypeptide comprising an R12C substitution.

[0133] In some cases, an HLA-A heavy chain polypeptide suitable for inclusion in a TMP of the present disclosure is an HLA-A02 (Y84C; A139C; A236C) polypeptide comprising the amino acid sequence shown in FIG. 21I (SEQ ID NO:232).

[0134] HLA-A11 (HLA-A*1101)

[0135] As one non-limiting example, an MHC class I heavy chain polypeptide of a TMP can comprise an amino acid sequence having at least 75%, at least 80%, at least 85%, at least 90%, at least 95%, at least 98%, at least 99%, or 100%, amino acid sequence identity to the human HLA-A11 heavy chain amino acid sequence shown in FIG. 21J (SEQ ID NO:115). Such an MHC class I heavy chain may be prominent in Asian populations, including populations of individuals of Asian descent.

[0136] HLA-A11 (Y84A; A236C)

[0137] As one non-limiting example, in some cases, the MHC class I heavy chain polypeptide is an HLA-A11 allele that comprises Y84A and A236C substitutions. For example, in some cases, the MHC class I heavy chain polypeptide comprises an amino acid sequence having at least 75%, at least 80%, at least 85%, at least 90%, at least 95%, at least 98%, at least 99%, or 100%, amino acid sequence identity to the human HLA-A A11 heavy chain (Y84A; A236C) amino acid sequence shown in FIG. 21K (SEQ ID NO:116), where amino acid 84 is Ala and amino acid 236 is Cys. In some cases, the Cys-236 forms an interchain disulfide bond with Cys-12 of a variant β2M polypeptide that comprises an R12C substitution, as shown in FIG. 21L (SEQ ID NO:233), where amino acid 84 is Cys and amino acid 236 is Cys.

[0138] HLA-A24 (HLA-A*2402)

[0139] As one non-limiting example, an MHC class I heavy chain polypeptide of a TMP of the present disclosure can comprise an amino acid sequence having at least 75%, at least 80%, at least 85%, at least 90%, at least 95%, at least 98%, at least 99%, or 100%, amino acid sequence identity to the human HLA-A24 heavy chain amino acid sequence shown in FIG. 21M (SEQ ID NO:117). Such an MHC class I heavy chain may be prominent in Asian populations, including populations of individuals of Asian descent. In some cases, amino acid 84 is an Ala. In some cases, amino acid 84 is a Cys. In some cases, amino acid 236 is a Cys. In some cases, amino acid 84 is an Ala and amino acid 236 is a Cys. In some cases, amino acid 84 is a Cys and amino acid 236 is a Cys.

[0140] As one non-limiting example, an MHC class I heavy chain polypeptide of a TMP of the present disclosure can comprise an amino acid sequence having at least 75%, at least 80%, at least 85%, at least 90%, at least 95%, at least 98%, at least 99%, or 100%, amino acid sequence identity to the human HLA-A24 (also referred to as HLA-A*2402) heavy chain amino acid sequence shown in FIG. 21N (SEQ ID NO:586). Such an MHC class I heavy chain may be prominent in Asian populations, including populations of individuals of Asian descent. In some cases, amino acid X1 at position 84 is an Ala. In some cases, amino acid 84 is a Cys. In some cases, amino acid X2 at position 236 is a Cys. In some cases, amino acid 84 is an Ala and amino acid 236 is a Cys. In some cases, amino acid 84 is a Cys and amino acid 236 is a Cys.

[0141] In some cases, an MHC class I heavy chain polypeptide of a TMP of the present disclosure can comprise an amino acid sequence having at least 75%, at least 80%, at least 85%, at least 90%, at least 95%, at least 98%, at least 99%, or 100%, amino acid sequence identity to the human HLA-A24 (also referred to as HLA-A*2402) heavy chain amino acid sequence shown in one of the following Figures:
[0142] (i) FIG. 21O (SEQ ID NO:235), where amino acid 84 is Tyr and amino acid 236 is Ala (amino acids 84 and 236 are bold and underlined); and where the MHC class I heavy chain has a length of about 275 amino acids;
[0143] (ii) TMPFIG. 21P (SEQ ID NO:236), where amino acid 84 is Ala and amino acid 236 is Ala (amino acids 84 and 236 are bold and underlined); and where the MHC class I heavy chain has a length of about 275 amino acids;
[0144] (iii) TMPFIG. 21Q (SEQ ID NO:237), where amino acid 84 is Tyr and amino acid 236 is Cys (amino acids 84 and 236 are bold and underlined); and where the MHC class I heavy chain has a length of about 275 amino acids;
[0145] (iv) TMPFIG. 21R (SEQ ID NO:238), where amino acid 84 is Ala and amino acid 236 is Cys (amino acids 84 and 236 are bold and underlined); and where the MHC class I heavy chain has a length of about 275 amino acids;
[0146] (v) TMPFIG. 21S (SEQ ID NO:239), where amino acid 84 is Cys and amino acid 236 is Ala (amino acids 84 and 236 are bold and underlined); and where the MHC class I heavy chain has a length of about 275 amino acids; and
[0147] (vi) TMPFIG. 21T (SEQ ID NO:240), where amino acid 84 is Cys and amino acid 236 is Cys (amino acids 84 and 236 are bold and underlined); and where the MHC class I heavy chain has a length of about 275 amino acids.

[0148] HLA-A33 (HLA-A*3303)

[0149] As one non-limiting example, an MHC class I heavy chain polypeptide of a TMP of the present disclosure can comprise an amino acid sequence having at least 75%, at least 80%, at least 85%, at least 90%, at least 95%, at least 98%, at least 99%, or 100%, amino acid sequence identity to the human HLA-A33 heavy chain amino acid sequence shown in FIG. 21U (SEQ ID NO:118). Such an MHC class I heavy chain may be prominent in Asian populations, including populations of individuals of Asian descent. In some cases, amino acid 84 is an Ala. In some cases, amino acid 84 is a Cys. In some cases, amino acid 236 is a Cys. In some cases, amino acid 84 is an Ala and amino acid 236 is a Cys. In some cases, amino acid 84 is a Cys and amino acid 236 is a Cys.

[0150] HLA-B

[0151] In some cases, a TMP of the present disclosure comprises an HLA-B heavy chain polypeptide. The HLA-B heavy chain peptide sequences, or portions thereof, that may be that may be incorporated into a TMP of the present disclosure include, but are not limited to, the alleles: B*0702, B*0801, B*1502, B*3802, B*4001, B*4601, and B*5301, which are aligned without all, or substantially all, of the leader, transmembrane and cytoplasmic sequences in FIG. 8A. Any of those alleles may comprise a mutation at one or more of positions 84, 139 and/or 236 (as shown in FIG. 8A) selected from: a tyrosine to alanine at position 84 (Y84A); a tyrosine to cysteine at position 84 (Y84C); an alanine to cysteine at position 139 (A139C); and an alanine to cysteine substitution at position 236 (A236C). In addition, a HLA-B polypeptide comprising an amino acid sequence having at least 75% (e.g., at least 80%, at least 85%, at least 90%, at least 95%, at least 98%, at least 99%) or 100% amino acid sequence identity to all or part (e.g., 50, 75, 100, 150, 200, or 250 contiguous amino acids) of the sequence of those HLA-B alleles may also be employed (e.g., it may comprise 1-25, 1-5, 5-10, 10-15, 15-20, 20-25, or 25-30 amino acid insertions, deletions, and/or substitutions).

[0152] In some cases, a TMP of the present disclosure comprises an HLA-B heavy chain polypeptide comprising the HLA-B consensus amino acid sequence shown in FIG. 21 JJ (SEQ ID NO:69), wherein X1 is H, Y, or D; X2 is A or S; X3 is M or V; X4 is A, S, or T; X5 is Q or L; X6 is A or T; X7 is E, M K, or T; X8 is A or T; X9 is E or N; X10 is I or K; X11 is Y, F, S, or C; X12 is N or Q; X13 is A or T; X14 is D or Y; X15 is E or V; X16 is S or N; X17 is T, N, or I; X18 is A or L; X19 is L, or R; X20 is R or G; X21 is T or I; X22 is L or I; X23 is R or S; X24 is R or S; X25 is S or T; X26 is L or W; X27 is E OR V; X28 is R, D, L or W; X29 is A or T; X30 is L, E or T; X31 is E or D; X32 is K or T; X33 is E or Q; and X34 is I or V.

[0153] As an example, an MHC class I heavy chain polypeptide of a TMP of the present disclosure can comprise an amino acid sequence having at least 75%, at least 80%, at least 85%, at least 90%, at least 95%, at least 98%, at least 99%, or 100%, amino acid sequence identity to the human HLA-B heavy chain amino acid sequence shown in FIG. 21V (SEQ ID NO:119).

[0154] HLA-B (Y84A; A236C)

[0155] As one non-limiting example, in some cases, the MHC class I heavy chain polypeptide is an HLA-B polypeptide that comprises Y84A and A236C substitutions. For example, in some cases, the MHC class I heavy chain polypeptide comprises an amino acid sequence having at least 75%, at least 80%, at least 85%, at least 90%, at least 95%, at least 98%, at least 99%, or 100%, amino acid sequence identity to the human HLA-B heavy chain (Y84A; A236C) amino acid sequence shown in FIG. 21W (SEQ ID NO:121), where amino acid 84 is Ala and amino acid 236 is Cys. In some cases, the Cys-236 forms an interchain disulfide bond with Cys-12 of a variant β2M polypeptide that comprises an R12C substitution.

[0156] HLA-B (Y84C; A139C)

[0157] In some cases, the MHC class I heavy chain polypeptide comprises Y84C and A139C substitutions. For example, in some cases, the MHC class I heavy chain polypeptide comprises an amino acid sequence having at least 75%, at least 80%, at least 85%, at least 90%, at least 95%, at least 98%, at least 99%, or 100%, amino acid sequence identity to the human HLA-B heavy chain (Y84C; A139C) amino acid sequence shown in FIG. 21X (SEQ ID NO:122), where amino acid 84 is Cys and amino acid 139 is Cys. In some cases, Cys-84 forms an intrachain disulfide bond with Cys-139.

[0158] HLA-B*0702

[0159] As an example, in some cases, a MHC class I heavy chain polypeptide present in a TMP of the present disclosure comprises an amino acid sequence of HLA-B*0702 (SEQ ID NO:62) in FIG. 8A, or a sequence having at least 75% (e.g., at least 80%, at least 85%, at least 90%, at least 95%, at least 98%, at least 99%) or 100%, amino acid sequence identity to all or part (e.g., 50, 75, 100, 150, 200, or 250 contiguous amino acids) of that sequence (e.g., it may comprise 1-25, 1-5, 5-10, 10-15, 15-20, 20-25, or 25-30 amino acid insertions, deletions, and/or substitutions). In some cases, where the HLA-B heavy chain polypeptide of TMP of the present disclosure has less than 100% identity to the sequence labeled HLA-B in FIG. 6, or labeled “B*0702 in FIG. 8A, it may comprise a mutation at one or more of positions 84, 139 and/or 236 selected from: a tyrosine to alanine substitution at position 84 (Y84A); a tyrosine to cysteine substitution at position 84 (Y84C); an alanine to cysteine at position 139 (A139C); and an alanine to cysteine substitution at position 236 (A236C). In some cases, the HLA-B heavy chain polypeptide of TMP of the present disclosure comprises Y84A and A236C substitutions. In some cases, the HLA-B*0702 heavy chain polypeptide of TMP of the present disclosure comprises Y84C and A139C substitutions. In some cases, the HLA-B heavy chain polypeptide of TMP of the present disclosure comprises Y84C, A139C, and A236C substitutions.

[0160] HLA-C

[0161] In some cases, a TMP of the present disclosure comprises an HLA-C heavy chain polypeptide. The HLA-C heavy chain polypeptide, or portions thereof, that may be that may be incorporated into a TMP of the present disclosure include, but are not limited to, the alleles: C*0102, C*0303, C*0304, C*0401, C*0602, C*0701, C*0801, and C*1502, which are aligned without all, or substantially all, of the leader, transmembrane and cytoplasmic sequences in FIG. 9A. Any of those alleles may comprise a mutation at one or more of positions 84, 139 and/or 236 (as shown in FIG. 9A) selected from: a tyrosine to alanine substitution at position 84 (Y84A); a tyrosine to cysteine substitution at position 84 (Y84C); an alanine to cysteine substitution at position 139 (A139C); and an alanine to cysteine substitution at position 236 (A236C). In addition, an HLA-C polypeptide comprising an amino acid sequence having at least 75% (e.g., at least 80%, at least 85%, at least 90%, at least 95%, at least 98%, at least 99%) or 100% amino acid sequence identity to all or part (e.g., 50, 75, 100, 150, 200, or 250 contiguous amino acids) of the sequence of those HLA-C alleles may also be employed (e.g., it may comprise 1-25, 1-5, 5-10, 10-15, 15-20, 20-25, or 25-30 amino acid insertions, deletions, and/or substitutions).

[0162] In some cases, a TMP of the present disclosure comprises an HLA-C heavy chain polypeptide comprising the following HLA-C consensus amino acid sequence:

[0163] X1SHSMX2YFX3TAVSX4PGRGEPX5FIX6VGYVDDTQFVX7FDSDAASPRGEPR X8PWVEQEGPEYWDRETQX9YKRQAQX10DRVX11LRX12LRGYYNQSEX13X14SHX15X16QX 17MX18GCDX19GPDGRLLRGX20X21QX22AYDGKDYIALNEDLRSWTAADTAAQITQRKX23E AARX24AEQX25RAYLEGX26CVEWLRRYLX27NGKX28TLQRAEX29PKTHVTHHPX30SDHEA TLRCWALGFYPAEITLTWQX31DGEDQTQDTELVETRPAGDGTFQKWAAVX32VPSGX33EQR YTCHX34QHEGLX35EPLTLX36WX37P (SEQ ID NO:79), wherein X1 is C or G; X2 is R or K; X3 is F, Y, S, or D; X4 is R or W; X5 is H or R; X6 is A or S; X7 is Q or R; X8 is A or E; X9 is N or K; X10 is T or A; X11 is S or N; X12 is N or K; X13 is A or D; X14 is G or R; X15 is T or I; X16 is L or I; X17 is W or R; X18 is C, Y, F, or S; X19 is L, or V; X20 is Y or H; X21 is D or N; X22 is Y, F, S, or L; X23 is L or W; X24 is E, A, Or T; X25 is R, L, or W; X26 is L or T; X27 is E OR K; X28 is E or K; X29 is H or P; X30 is R or V; X31 is W or R; X32 is V or M; X33 is E or Q; X34 is M or V; X35 is P or Q; X36 is R or S; and X37 is P or G.

[0164] As an example, an MHC class I heavy chain polypeptide of a TMP of the present disclosure can comprise an amino acid sequence having at least 75%, at least 80%, at least 85%, at least 90%, at least 95%, at least 98%, at least 99%, or 100%, amino acid sequence identity to the human HLA-C heavy chain amino acid sequence shown in FIG. 21Y (SEQ ID NO:123).

[0165] HLA-C(Y84A; A236C)

[0166] As one non-limiting example, in some cases, the MHC class I heavy chain polypeptide is an HLA-C polypeptide that comprises Y84A and A236C substitutions. For example, in some cases, the MHC class I heavy chain polypeptide comprises an amino acid sequence having at least 75%, at least 80%, at least 85%, at least 90%, at least 95%, at least 98%, at least 99%, or 100%, amino acid sequence identity to the human HLA-C heavy chain (Y84A; A236C) amino acid sequence shown in FIG. 21Z (SEQ ID NO:124), where amino acid 84 is Ala and amino acid 236 is Cys. In some cases, the Cys-236 forms an interchain disulfide bond with Cys-12 of a variant β2M polypeptide that comprises an R12C substitution.

[0167] HLA-C(Y84C; A139C)

[0168] In some cases, the MHC class I heavy chain polypeptide comprises Y84C and A139C substitutions. For example, in some cases, the MHC class I heavy chain polypeptide comprises an amino acid sequence having at least 75%, at least 80%, at least 85%, at least 90%, at least 95%, at least 98%, at least 99%, or 100%, amino acid sequence identity to the human HLA-C heavy chain (Y84C; A139C) amino acid sequence shown in FIG. 21AA (SEQ ID NO:125), where amino acid 84 is Cys and amino acid 139 is Cys. In some cases, Cys-84 forms an intrachain disulfide bond with Cys-139.

[0169] HLA-C*0701

[0170] In some cases, a MHC class I heavy chain polypeptide of a TMP of the present disclosure comprises an amino acid sequence of HLA-C*0701 of FIG. 9A (labeled HLA-C in FIG. 6), or an amino acid sequence having at least 75% (e.g., at least 80%, at least 85%, at least 90%, at least 95%, at least 98%, at least 99%) or 100% amino acid sequence identity to all or part (e.g., 50, 75, 100, 150, 200, or 250 contiguous amino acids) of that sequence (e.g., it may comprise 1-25, 1-5, 5-10, 10-15, 15-20, 20-25, or 25-30 amino acid insertions, deletions, and/or substitutions). In some cases, where the HLA-C heavy chain polypeptide of a TMP of the present disclosure has less than 100% identity to the sequence labeled HLA-C*0701 in FIG. 9A, it may comprise a mutation at one or more of positions 84, 139 and/or 236 selected from: a tyrosine to alanine substitution at position 84 (Y84A); a tyrosine to cysteine substitution at position 84 (Y84C); an alanine to cysteine at position 139 (A139C); and an alanine to cysteine substitution at position 236 (A236C). In some cases, the HLA-C heavy chain polypeptide of a TMP of the present disclosure comprises Y84A and A236C substitutions. In some cases, the HLA-C*0701 heavy chain polypeptide of a T-Cell-MMP or its epitope conjugate comprises Y84C and A139C substitutions. In some cases, the HLA-C heavy chain polypeptide of a TMP of the present disclosure comprises Y84C, A139C, and A236C substitutions.

[0171] Non-Classical HLA-E, -F, and -G MHC Class I Heavy Chains

[0172] In some cases, a TMP of the present disclosure comprises a non-classical MHC class I heavy chain polypeptide. Among the non-classical HLA heavy chain polypeptides, or portions thereof, that may be that may be incorporated into a TMP of the present disclosure include, but are not limited to, those of HLA-E, -F, and -G alleles Amino acid sequences for HLA-E, -F, and -G heavy chain polypeptides, (and the HLA-A, B and C alleles) may be found on the world wide web hla.alleles.org/nomenclature/index.html, the European Bioinformatics Institute (www(dot)ebi(dot)ac(dot)uk), which is part of the European Molecular Biology Laboratory (EMBL), and at the National Center for Biotechnology Information (www(dot)ncbi(dot)nlm(dot)nih(dot)gov).

[0173] Non-limiting examples of suitable HLA-E alleles include, but are not limited to, HLA-E*0101 (HLA-E*01:01:01:01), HLA-E*01:03 (HLA-E*01:03:01:01), HLA-E*01:04, HLA-E*01:05, HLA-E*01:06, HLA-E*01:07, HLA-E*01:09, and HLA-E*01:10. Non-limiting examples of suitable HLA-F alleles include, but are not limited to, HLA-F*0101 (HLA-F*01:01:01:01), HLA-F*01:02, HLA-F*01:03 (HLA-F*01:03:01:01), HLA-F*01:04, HLA-F*01:05, and HLA-F*01:06. Non-limiting examples of suitable HLA-G alleles include, but are not limited to, HLA-G*0101 (HLA-G*01:01:01:01), HLA-G*01:02, HLA-G*01:03 (HLA-G*01:03:01:01), HLA-G*01:04 (HLA-G*01:04:01:01), HLA-G*01:06, HLA-G*01:07, HLA-G*01:08, HLA-G*01:09: HLA-G*01:10, HLA-G*01:10, HLA-G*01:11, HLA-G*01:12, HLA-G*01:14, HLA-G*01:15, HLA-G*01:16, HLA-G*01:17, HLA-G*01:18: HLA-G*01:19, HLA-G*01:20, and HLA-G*01:22. Consensus sequences for those HLA E, —F and -G alleles without all, or substantially all, of the leader, transmembrane and cytoplasmic sequences are provided in FIG. 10, and aligned with consensus sequences of the above-mentioned HLA-A, -B and -C alleles in FIG. 11.

[0174] FIG. 1—provides a consensus sequence for each of HLA-E, -F, and -G with the variable aa positions indicated as “X” residues sequentially numbered and the locations of aas 84, 139 and 236 double underlined.

[0175] FIG. 11 provides an alignment of the consensus amino acid sequences for HLA-A, -B, -C, -E, -F, and -G, which are given in FIGS. 7-11. Variable residues in each sequence are listed as “X” with the sequential numbering removed. As indicated in FIG. 6, the locations of aas 84, 139 and 236 are indicated with their flanking five-amino acid clusters that may be replaced by 1 to 5 amino acids selected independently from (i) any naturally occurring amino acid or (ii) any naturally occurring amino acid except proline or glycine are also shown.

[0176] Any of the above-mentioned HLA-E, -F, and/or -G alleles may comprise a substitution at one or more of positions 84, 139 and/or 236 as shown in FIG. 11 for the consensus sequences. In some cases, the substitutions may be selected from a: position 84 tyrosine to alanine (Y84A) or cysteine (Y84C), or, in the case of HLA-F, an R84A or R84C substitution; a position 139 alanine to cysteine (A139C), or, in the case of HLA-F, a V139C; and an alanine to cysteine substitution at position 236 (A236C). In addition, an HLA-E, -F and/or -G sequence having at least 75% (e.g., at least 80%, at least 85%, at least 90%, at least 95%, at least 98%, at least 99%) or 100% amino acid sequence identity to all or part (e.g., 50, 75, 100, 150, 200, or 250 contiguous amino acids) of any of the consensus sequences of set forth in FIG. 11 may also be employed (e.g., the sequences may comprise 1-25, 1-5, 5-10, 10-15, 15-20, 20-25, or 25-30 amino acid insertions, deletions, and/or substitutions in addition to changes at variable residues listed therein).

[0177] Mouse H2K

[0178] In some cases, a MHC class I heavy chain polypeptide present in a TMP of the present disclosure comprises an amino acid sequence of MOUSE H2K (SEQ ID NO:45) (MOUSE H2K in FIG. 6), or a sequence having at least 75%, at least 80%, at least 85%, at least 90%, at least 95%, at least 98%, at least 99%, or 100% amino acid sequence identity to all or part (e.g., 50, 75, 100, 150, 200, or 250 contiguous amino acids) of that sequence (e.g., it may comprise 1-25, 1-5, 5-10, 10-15, 15-20, 20-25, or 25-30 amino acid insertions, deletions, and/or substitutions). In some cases, where the MOUSE H2K heavy chain polypeptide of a TMP of the present disclosure has less than 100% identity to the sequence labeled MOUSE H2K in FIG. 6, it may comprise a mutation at one or more of positions 84, 139 and/or 236 selected from: a tyrosine to alanine at position 84 (Y84A); a tyrosine to cysteine at position 84 (Y84C); an alanine to cysteine at position 139 (A139C); and an alanine to cysteine substitution at position 236 (A236C). In some cases, the MOUSE H2K heavy chain polypeptide of a TMP of the present disclosure comprises Y84A and A236C substitutions. In some cases, the MOUSE H2K heavy chain polypeptide of a TMP of the present disclosure comprises Y84C and A139C substitutions. In some cases, the MOUSE H2K heavy chain polypeptide of a TMP of the present disclosure comprises Y84C, A139C and A236C substitutions.

[0179] Exemplary Combinations

[0180] Table 1, below, presents various combinations of MHC class I heavy chain sequence modifications that can be incorporated in a TMP of the present disclosure.

TABLE 1

| | | Sequence | Specific |
|---|---|---|---|
| | HLA Heavy | Identity | Substitutions at aa |
| Entry | Chain Sequence | Range [symbol] | positions 84, 139 and/or 236 |
| 1 | HLA-A | 75%-99.8%, 80%-99.8%, 85%-99.8%, | None; Y84C; Y84A; |
| | Consensus | 90%-99.8%, 95%-99.8%, 98%-99.8%, | A139C; A236C; |
| | (FIG. 7B) | or 99%-99.8%; or 1-25, 1-5, 5-10, 10- | (Y84A & A236C); |
| | | 15, 15-20, or 20-25 aa insertions, | (Y84C & A139C); or |
| | | deletions, and/or substitutions (not | (Y84C, A139C & |
| | | counting variable residues) | A236C) |
| 2 | A*0101, A*0201, | 75%-99.8%, 80%-99.8%, 85%-99.8%, | None; Y84C; Y84A; |
| | A*0301, A*1101, | 90%-99.8%, 95%-99.8%, 98%-99.8%, | A139C; A236C; |
| | A*2402, A*2301, | or 99%-99.8%; or 1-25, 1-5, 5-10, 10- | (Y84A & A236C); |
| | A*2402, A*2407, | 15, 15-20, or 20-25 aa insertions, | (Y84C & A139C); or |
| | A*3303, or | deletions, and/or substitutions | (Y84C, A139C & |
| | A*3401 | | A236C) |
| | (FIG. 7A) | | |
| 3 | HLA-B | 75%-99.8%, 80%-99.8%, 85%-99.8%, | None; Y84C; Y84A; |
| | Consensus | 90%-99.8%, 95%-99.8%, 98%-99.8%, | A139C; A236C; |
| | (FIG. 8B) | or 99%-99.8%; or 1-25, 1-5, 5-10, 10- | (Y84A & A236C); |
| | | 15, 15-20, or 20-25 aa insertions, | (Y84C & A139C); or |
| | | deletions, and/or substitutions (not | (Y84C, A139C & |
| | | counting variable residues) | A236C) |
| 4 | B*0702, B*0801, | 75%-99.8%, 80%-99.8%, 85%-99.8%, | None; Y84C; Y84A; |
| | B*1502, B*3802, | 90%-99.8%, 95%-99.8%, 98%-99.8%, | A139C; A236C; |
| | B*4001, B*4601, | or 99%-99.8%; or 1-25, 1-5, 5-10, 10- | (Y84A & A236C); |
| | or B*5301 | 15, 15-20, or 20-25 aa insertions, | (Y84C & A139C); or |
| | (FIG. 8A) | deletions, and/or substitutions | (Y84C, A139C & |
| | | | A236C) |
| 5 | HLA-C | 75%-99.8%, 80%-99.8%, 85%-99.8%, | None; Y84C; Y84A; |
| | Consensus | 90%-99.8%, 95%-99.8%, 98%-99.8%, | A139C; A236C; |
| | (FIG. 9B) | or 99%-99.8%; or 1-25, 1-5, 5-10, 10- | (Y84A & A236C); |
| | | 15, 15-20, or 20-25 aa insertions, | (Y84C & A139C); or |
| | | deletions, and/or substitutions (not | (Y84C, A139C & |
| | | counting variable residues) | A236C) |
| 6 | C*0102, C*0303, | 75%-99.8%, 80%-99.8%, 85%-99.8%, | None; Y84C; Y84A; |
| | C*0304, C*0401, | 90%-99.8%, 95%-99.8%, 98%-99.8%, | A139C; A236C; |
| | C*0602, C*0701, | or 99%-99.8%; or 1-25, 1-5, 5-10, 10- | (Y84A & A236C); |
| | C*0801, or | 15, 15-20, or 20-25 aa insertions, | (Y84C & A139C); or |
| | C*1502 | deletions, and/or substitutions | (Y84C, A139C & |
| | (FIG. 9A) | | A236C) |
| 7 | HLA-E, F, or G | 75%-99.8%, 80%-99.8%, 85%-99.8%, | None; Y84C; Y84A; |
| | Consensus | 90%-99.8%, 95%-99.8%, 98%-99.8%, | A139C; A236C; |
| | (FIG. 10) | or 99%-99.8%; or 1-25, 1-5, 5-10, 10- | (Y84A & A236C); |
| | | 15, 15-20, or 20-25 aa insertions, | (Y84C & A139C); or |
| | | deletions, and/or substitutions (not | (Y84C, A139C & |
| | | counting variable residues) | A236C) |
| 8 | MOUSE H2K | 75%-99.8%, 80%-99.8%, 85%-99.8%, | None; Y84C; Y84A; |
| | (FIG. 6) | 90%-99.8%, 95%-99.8%, 98%-99.8%, | A139C; A236C; |
| | | or 99%-99.8%; or 1-25, 1-5, 5-10, 10- | (Y84A & A236C); |
| | | 15, 15-20, or 20-25 aa insertions, | (Y84C & A139C); or |
| | | deletions, and/or substitutions | (Y84C, A139C & |
| | | | A236C) |

[symbol]

The Sequence Identity Range is the permissible range in sequence identity of an MHC-H polypeptide sequence incorporated into a TMP relative to the corresponding portion of the sequences listed in FIG. 6-11 not counting the variable residues in the consensus sequences.

[0181] Beta-2 Microglobulin

[0182] A β2-microglobulin (β2M) polypeptide of a TMP of the present disclosure can be a human β2M polypeptide, a non-human primate β2M polypeptide, a murine β2M polypeptide, and the like. In some instances, a β2M polypeptide comprises an amino acid sequence having at least 75%, at least 80%, at least 85%, at least 90%, at least 95%, at least 98%, at least 99%, or 100%, amino acid sequence identity to a β2M amino acid sequence depicted in FIG. 4. In some instances, a β2M polypeptide comprises an amino acid sequence having at least 75%, at least 80%, at least 85%, at least 90%, at least 95%, at least 98%, at least 99%, or 100%, amino acid sequence identity to amino acids 21 to 119 of a β2M amino acid sequence depicted in FIG. 4.

[0183] In some cases, a suitable β2M polypeptide comprises the amino acid sequence of FIG. 21CC (SEQ ID NO:126); and the HLA Class I heavy chain polypeptide comprises the amino acid sequence of FIG. 21HH (SEQ ID NO:127), where the cysteine residues indicated as {C} form an disulfide bond between the α1 and α2-1 helices and the residue forms a disulfide bond with the β2M polypeptide cysteine at position 12. In the sequence above, “aa1” is “amino acid cluster 1”; “aa2” is “amino acid cluster 2”; “aa3” is “amino acid cluster 3”; “aa4” is “amino acid cluster 4”; “aa5” is “amino acid cluster 5”; and “aa6” is “amino acid cluster 6”; see, e.g., FIG. 8. Each occurrence of aa1, aa2, aa3, aa4, aa5, and aa6 is and independently selected to be 1-5 amino acid residues, wherein the amino acid residues are i) selected independently from any naturally occurring (e.g., encoded) amino acid or ii) any naturally occurring amino acid except proline or glycine.

[0184] In some cases, an MHC polypeptide comprises a single amino acid substitution relative to a reference MHC polypeptide (where a reference MHC polypeptide can be a wild-type MHC polypeptide), where the single amino acid substitution substitutes an amino acid with a cysteine (Cys) residue. Such non-naturally cysteine residues, when present in an MHC polypeptide of a first polypeptide of a heterodimeric TMP or in an MHC polypeptide in a single-chain TMP of the present disclosure, can form a disulfide bond with a cysteine residue present in a second polypeptide chain of a TMP of the present disclosure or in another MHC polypeptide in a single-chain TMP.

[0185] In some cases, a first MHC polypeptide in a first polypeptide of a heterodimeric TMP of the present disclosure, and/or the second MHC polypeptide in the second polypeptide of a heterodimeric TMP of the present disclosure, includes an amino acid substitution to substitute an amino acid with a cysteine, where the non-naturally occurring cysteine in the first MHC polypeptide forms a disulfide bond with a cysteine in the second MHC polypeptide, where a cysteine in the first MHC polypeptide forms a disulfide bond with the non-naturally occurring cysteine in the second MHC polypeptide, or where the non-naturally occurring cysteine in the first MHC polypeptide forms a disulfide bond with the non-naturally occurring cysteine in the second MHC polypeptide. Similarly, one of the MHC polypeptides in a single-chain TMP of the present disclosure includes an amino acid substitution to substitute an amino acid with a cysteine, where the non-naturally occurring cysteine in the MHC polypeptide forms a disulfide bond with a naturally occurring or non-naturally occurring cysteine in a different MHC polypeptide in the TMP.

[0186] For example, in some cases, one of following pairs of residues in an HLA β2-microglobulin and an HLA Class I heavy chain is substituted with cysteines (where residue numbers are those of the mature polypeptide): 1) β2M residue 12, HLA Class I heavy chain residue 236; 2) β2M residue 12, HLA Class I heavy chain residue 237; 3) β2M residue 8, HLA Class I heavy chain residue 234; 4) β2M residue 10, HLA Class I heavy chain residue 235; 5) β2M residue 24, HLA Class I heavy chain residue 236; 6) β2M residue 28, HLA Class I heavy chain residue 232; 7) β2M residue 98, HLA Class I heavy chain residue 192; 8) β2M residue 99, HLA Class I heavy chain residue 234; 9) β2M residue 3, HLA Class I heavy chain residue 120; 10) β2M residue 31, HLA Class I heavy chain residue 96; 11) β2M residue 53, HLA Class I heavy chain residue 35; 12) β2M residue 60, HLA Class I heavy chain residue 96; 13) β2M residue 60, HLA Class I heavy chain residue 122; 14) β2M residue 63, HLA Class I heavy chain residue 27; 15) β2M residue Arg3, HLA Class I heavy chain residue Gly120; 16) β2M residue His31, HLA Class I heavy chain residue Gln96; 17) β2M residue Asp53, HLA Class I heavy chain residue Arg35; 18) β2M residue Trp60, HLA Class I heavy chain residue Gln96; 19) β2M residue Trp60, HLA Class I heavy chain residue Asp122; 20) β2M residue Tyr63, HLA Class I heavy chain residue Tyr27; 21) β2M residue Lys6, HLA Class I heavy chain residue Glu232; 22) β2M residue Gln8, HLA Class I heavy chain residue Arg234; 23) β2M residue Tyr10, HLA Class I heavy chain residue Pro235; 24) β2M residue Ser11, HLA Class I heavy chain residue Gln242; 25) β2M residue Asn24, HLA Class I heavy chain residue Ala236; 26) β2M residue Ser28, HLA Class I heavy chain residue Glu232; 27) β2M residue Asp98, HLA Class I heavy chain residue His192; and 28) β2M residue Met99, HLA Class I heavy chain residue Arg234. The amino acid numbering of the MHC/HLA Class I heavy chain is in reference to the mature MHC/HLA Class I heavy chain, without a signal peptide. For example, in some cases, residue 236 of the mature HLA-A amino acid sequence is substituted with a Cys. In some cases, residue 236 of the mature HLA-B amino acid sequence is substituted with a Cys. In some cases, residue 236 of the mature HLA-C amino acid sequence is substituted with a Cys. In some cases, residue 32 (corresponding to Arg-12 of mature β2M) of an amino acid sequence depicted in FIG. 4 is substituted with a Cys.

[0187] In some cases, a β2M polypeptide comprises the amino acid sequence shown in FIG. 21BB (SEQ ID NO:128) or FIG. 21CC (SEQ ID NO:129).

[0188] In some cases, an HLA Class I heavy chain polypeptide comprises the amino acid sequence shown in FIG. 21DD (SEQ ID NO:130), 21EE (SEQ ID NO:131) or 21FF (SEQ ID NO:132).

[0189] In some cases, the β2M polypeptide of a TMP of this disclosure comprises the amino acid sequence of FIG. 21CC (SEQ ID NO:133) and the HLA Class I heavy chain polypeptide of the TMP comprises the amino acid sequence of FIG. 21EE (SEQ ID NO:134), where the Cys residues that are underlined and in bold form a disulfide bond with one another in the TMP.

[0190] In some cases, the β2M polypeptide comprises the amino acid sequence of FIG. 21GG (SEQ ID NO:135).

[0191] In some cases, MHC polypeptides in a heterodimeric or single-chain TMP of the present disclosure are disulfide linked to one another through: i) a Cys residue present in a linker connecting the peptide epitope and a β2M polypeptide; and ii) a Cys residue present in an MHC class I heavy chain. In some cases, the Cys residue present in the MHC class I heavy chain is a Cys introduce as a Y84C substitution. In some cases, the linker connecting the peptide epitope and the β2M polypeptide is GCGGS(GGGGS)n (SEQ ID NO:583), where n is 1, 2, 3, 4, 5, 6, 7, 8, or 9. For example, in some cases, the linker comprises the amino acid sequence GCGGSGGGGSGGGGSGGGGS (SEQ ID NO:137). As another example, the linker comprises the amino acid sequence GCGGSGGGGSGGGGS (SEQ ID NO:138). Examples of disulfide-linked first and second polypeptides of a heterodimeric TMP of the present disclosure are depicted schematically in FIG. 2A-2F.

### Multiple Disulfide Bonded TMPS

[0192] In some cases, the first polypeptide and the second polypeptide of a heterodimeric TMP of the present disclosure are linked to one another by at least two disulfide bonds (i.e., two interchain disulfide bonds). Examples of such multiple disulfide-linked TMP are depicted schematically in FIGS. 12A and 12B; and in Ha 16C. In addition, where a heterodimeric or single-chain TMP of the present disclosure comprises an Ig Fc polypeptide, a heterodimeric TMP can be dimerized, such that disulfide bonds link the Ig Fc polypeptides in the two heterodimeric TMPs. Such an arrangement is depicted schematically in FIGS. 12C and 12D, where disulfide bonds are represented by dashed lines. Unless otherwise stated, the at least two disulfide bonds described in the multiple disulfide-linked TMPPs in this section are not referring to disulfide bonds linking Ig Fc polypeptides in dimerized TMPs.

[0193] For example, in some instances, the first polypeptide and the second polypeptide of a heterodimeric TMP of the present disclosure are linked to one another by 2 interchain disulfide bonds. As another example, in some instances, the first polypeptide and the second polypeptide of a TMP of the present disclosure are linked to one another by 3 interchain disulfide bonds. As another example, in some instances, the first polypeptide and the second polypeptide of a TMP of the present disclosure are linked to one another by 4 interchain disulfide bonds.

[0194] In some cases where a peptide epitope of a heterodimeric or single-chain TMP of the present disclosure is linked to a β2M polypeptide by a linker comprising a Cys, at least one of the at least two disulfide bonds links a Cys in the linker to a Cys in an MHC class I heavy chain in TMP. In some cases, where a peptide epitope of a TMP of the present disclosure is linked to an MHC class I heavy chain polypeptide by a linker, at least one of the at least two disulfide bonds links a Cys in the linker to a Cys in a β2M polypeptide present in the TMP.

[0195] In some cases, a multiple disulfide-linked TMP of the present disclosure a double disulfide-linked TMP) exhibits increased stability and/or improved expression, compared to a control TMP that includes only one of the at least two disulfide bonds. In some cases, a multiple disulfide-linked TMP (e.g., a double disulfide-linked TMP) of the present disclosure exhibits increased in vitro stability, compared to a control TMP that includes only one of the at least two disulfide bonds. For example, in some cases, a multiple disulfide-linked TMP of the present disclosure (e.g., a double disulfide-linked TMP) exhibits at least 5%, at least 10%, at least 15%, at least 20%, at least 25%, at least 50%, at least 2-fold, at least 5-fold, or at least 10-fold, greater in vitro stability, compared to a control TMP that includes only one of the at least two disulfide bonds.

[0196] Stability is determined by measuring the percent of TMP remaining in the solution after a specified time in the solution at a specified temperature. Stability can be measured in the PBS buffer solution containing 500 mM NaCl (described above) in vitro over a specified period of time and at a specified temperature (e.g., in a solution at a temperature of 37° C. to 42° C. for a period of time of from 1 hour to 28 days; e.g., for 1 hour at 37° C.; 1 day at 37° C.; 5 days at 37° C.; 1 hour at 42° C.; 1 day at 42° C.; 5 days at 42° C.; 5 days at 37° C.; 10 days at 37° C.; 14 days at 37° C.; 28 days at 37° C.; and the like), compared to a control TMMP lacking the at least one disulfide bond between the first polypeptide and the second polypeptide of the heterodimer. The TMMP can be present in the PBS buffer solution in a concentration of from 0.1 mg/mL to 10 mg/mL, e.g., about 1 mL, about 2 mL, about 3 mL, about 4 mL, about 5 mL, about 6 mL, about 7 mL, about 8 mL, about 9 mL, or about 10 mL, and the buffer solution can be kept at 37° C. or 42° C. for 1 hour, 5 days, 10 days, 14 days, 21 days, or 28 days.

[0197] Whether a multiple disulfide-linked TMP of the present disclosure exhibits increased in vitro stability compared to a control TMP that includes only one of the at least two disulfide bonds, can be determined by measuring the amount of each TMP present in samples as discussed above, e.g., kept at 37° C. and/or 42° C. for 1 hour, 5 days, 10 days, 14 days, 21 days, or 28 days.

[0198] For example, in some cases, a multiple disulfide-linked TMP (e.g., a double disulfide-linked TMP) of the present disclosure exhibits at least 5%, at least 10%, at least 15%, at least 20%, at least 25%, at least 50%, at least 2-fold, at least 5-fold, or at least 10-fold, greater in vitro stability, compared to a control TMP that includes only one of the at least two disulfide bonds, when the TMP is stored at 37° C. for a period of time (e.g., for a period of time of from about 1 week to about 2 weeks, from about 2 weeks to about 4 weeks, or from about 4 weeks to about 2 months). For example, in some cases, the amount of disulfide-linked heterodimeric TMP remaining after storing a multiple disulfide-linked TMP (e.g., a double disulfide-linked TMP) of the present disclosure in vitro at 37° C. for 28 days is at least at least 5%, at least 10%, at least 15%, at least 20%, at least 25%, at least 50%, at least 2-fold, at least 5-fold, or at least 10-fold, greater than the amount of disulfide-linked heterodimeric TMP remaining after storing a control TMP (a TMP that includes only one of the at least two disulfide bonds present in the multiple disulfide-linked TMP) in vitro at 37° C. for 28 days.

[0199] In some cases, a multiple disulfide-linked TMP of the present disclosure exhibits increased in vivo stability, compared to a control TMP that includes only one of the at least two disulfide bonds. For example, in some cases, a multiple disulfide-linked TMP of the present disclosure exhibits at least 5%, at least 10%, at least 15%, at least 20%, at least 25 at least 50%, at least 2-fold, at least 5-fold, or at least 10-fold, greater in vivo stability, compared to a control TMP that includes only one of the at least two disulfide bonds.

[0200] In some cases, the presence of two disulfide bonds in a multiple disulfide-linked TMP of the present disclosure (e.g., a double disulfide-linked TMP) provides for increased production of disulfide-linked heterodimeric or single-chain TMP, compared to the amount of disulfide-linked heterodimeric TMP produced when the TMP is a control TMP that includes only one of the at least two disulfide bonds. For example, a multiple disulfide-linked TMP of the present disclosure (e.g., a double disulfide-linked TMP) can be produced in a mammalian cell in in vitro cell culture, where the mammalian cell is cultured in a liquid cell culture medium. The TMP can be secreted into the cell culture medium. The cells can be lysed, generating a cell lysate, and the TMP can be present in the cell lysate. The TMP can be purified from the cell culture medium and/or the cell lysate. For example, where the TMP comprises an IgG1 Fc polypeptide, the cell culture medium and/or the cell lysate can be contacted with immobilized protein A (e.g., the cell culture medium and/or the cell lysate can be applied to a protein A column, where protein A is immobilized onto beads). TMP present in the cell culture medium and/or the cell lysate becomes bound to the immobilized protein A. After washing the column to remove unbound materials, the bound TMP is eluted, generating a protein A eluate. The amount of disulfide-linked heterodimeric or single-chain TMP present in the protein A ciliate is a least 0.5%, at least 1%, at least 2%, at least 3%, at least 4%, at least 5%, at least 6%, at least 7%, at least 8%, at least 9%, Or at least 10%, higher than the amount of disulfide-linked heterodimeric or single-chain TMP present in the protein A eluate when the TMP is a control TMP that includes only one of the at least two disulfide bonds present in the multiple disulfide-linked TMP (e.g., a double disulfide-linked. TMP). In some cases, the percent of the total TMP protein in the eluate that is non-aggregated disulfide-linked heterodimeric or single-chain TMP is at least 70%, at least 75%, at least 80%, at least 85%, at least 90%, at least 95%, or at least 99%. The protein A eluate can be subjected to size exclusion chromatography (SEC) and/or one or more other additional purification steps.

[0201] In some cases, a T-cell modulatory polypeptide of the present disclosure comprises at least one heterodimer comprising: a) a first polypeptide comprising: i) a KRAS peptide, where the KRAS peptide has a length of at least 4 amino acids, e.g., from 4 amino acids to about 25 amino acids (e.g., 4 amino acids (aa), 5 aa, 6 aa, 7 aa, 8 aa, 9 aa, 10 aa, 11 aa, 12 aa, 13 aa, 14 aa, 15 aa, 16 aa, 17 aa, 18 aa, 19 aa, 20 aa, 21 aa, 22 aa, 23 aa, 24 aa, or 25 aa, and peptides within a range of from 4 to 20 amino acids, from 6 to 18 amino acids, from 8 to 15 amino acids, from 8 to 12 amino acids, from 5 to 10 amino acids, from 10 to 20 amino acids, and from 15 to 25 amino acids in length); and ii) first MHC polypeptide; b) a second polypeptide comprising a second MHC polypeptide, and c) at least one immunomodulatory polypeptide, where the first and/or the second polypeptide comprises the immunomodulatory polypeptide, and where the heterodimer comprises at least two disulfide bonds (e.g., two disulfide bonds) between the first polypeptide and the second polypeptide (e.g., the heterodimer comprises: i) a first disulfide bond linking the first polypeptide and the second polypeptide; and ii) a second disulfide bond linking the first polypeptide and the second polypeptide). Expressed another way, the first polypeptide comprises a first Cys residue that forms a disulfide bond (a first disulfide bond) with a first Cys residue in the second polypeptide; and the first polypeptide comprises a second Cys residue that forms a disulfide bond (a second disulfide bond) with a second Cys residue in the second polypeptide.

[0202] In some cases, a TMP of the present disclosure comprises: a) a first polypeptide comprising, in order from N-terminus to C-terminus: i) a KRAS peptide; ii) a peptide linker; and iii) a β2M polypeptide; and b) a second polypeptide comprising an MHC class I heavy chain polypeptide, where one or both of the first and the second polypeptides comprises at least one immunomodulatory polypeptide, where the TMP comprises: a) a first disulfide linkage between: i) a Cys present in the linker between the KRAS peptide and the β2M polypeptide; and ii) a first Cys introduced into the MHC class I heavy chain polypeptide; and h) at least a second disulfide linkage between the first polypeptide and the second polypeptide, where the at least a second disulfide linkage is between: i) a Cys in the first polypeptide that is C-terminal to the Cys present in the tinker; and ii) a Cys in the second polypeptide that is C-terminal to the first Cys introduced into the MHC class I heavy chain polypeptide.

[0203] Generally speaking, potential locations in the heterodimeric or single-chain TMP for disulfide bonds are where residues in the different polypeptides of the TMP are separated by a distance of 5 angstroms or less. Such locations represent potential locations where Cys residues, if not naturally present, can be substituted for the residues that exist in the polypeptides. For example, a first and second polypeptide of a heterodimeric TMP potentially can be linked via a disulfide bond between two Cys residues that are generally no more than about 5 angstroms apart from one another in the heterodimer. In some cases, one or both of the Cys residues are non-naturally occurring. An amino acid in the B2M and MHC heavy chain of heterodimeric or single-chain TMPs that are no more than 5 angstroms from one another represent amino acids that, when substituted with a Cys, can form a disulfide bond in a TMP of the present disclosure. Similarly, a disulfide bond can be formed between a Cys residue in a linker and a naturally occurring or non-naturally occurring Cys residue in an MHC heavy chain where the two Cys residues are no more than about 5 angstroms apart from each other. Notably, however, not all pairs of residues separated by about 5 angstroms or less will be suitable for formation of a disulfide bond or provide a disulfide bond that stabilizes the resulting TMP or provides enhanced expression.

[0204] A multiple disulfide-linked heterodimeric TMP of the present disclosure (e.g., a double disulfide-linked TMP) can comprise, for example: a) a first polypeptide comprising: i) a KRAS peptide (e.g., a KRAS peptide of from 4 amino acids to about 25 amino acids in length, that is bound by a TCR when the peptide is complexed with MHC polypeptides); and ii) a first MHC polypeptide, where the first polypeptide comprises a peptide linker between the KRAS peptide and the first MHC polypeptide, where the peptide linker comprises a Cys residue, and where the first MHC polypeptide is a β2M polypeptide that comprises an amino acid substitution that introduces a Cys residue; b) and a second polypeptide comprising a second MHC polypeptide, where the second MHC polypeptide is a Class I heavy chain comprising a Y84C substitution and an A236C substitution, based on the amino acid numbering of HLA-A*0201 (depicted in FIG. 7A), or at corresponding positions in another Class I heavy chain allele, where the TMP comprises a disulfide bond between the Cys residue in the peptide linker and the Cys residue at amino acid position 84 of the Class I heavy chain or corresponding position of another Class I heavy chain allele, and where the TMP comprises a disulfide bond between the introduced Cys residue in the β2M polypeptide and the Cys at amino acid position 236 of the Class I heavy chain or corresponding position of another Class I heavy chain allele; and c) at least one immunomodulatory polypeptide, where the first and/or the second polypeptide comprises the at least one immunomodulatory polypeptide. Examples are depicted schematically in FIG. 12A and FIG. 12B.

[0205] In some cases, the peptide linker comprises the amino acid sequence GCGGS (SEQ ID NO:139). In some cases, the peptide linker comprises the amino acid sequence GCGGS(GGGGS)n (SEQ ID NO: 140), where n is 1, 2, 3, 4, 5, 6, 7, 8, 9, or 10; e.g., 1, 2, or 3.

[0206] In some cases, the peptide linker comprises the amino acid sequence CGGGS (SEQ ID NO:141). In some cases, the peptide linker comprises the amino acid sequence CGGGS(GGGGS)n (SEQ ID NO: 142), where n is 1, 2, 3, 4, 5, 6, 7, 8, 9, or 10; e.g., 1, 2, or 3.

[0207] In some cases, the peptide linker comprises the amino acid sequence GGCGS (SEQ ID NO:587). In some cases, the peptide linker comprises the amino acid sequence GGCGS(GGGGS)n (SEQ ID NO:592), where n is 1, 2, 3, 4, 5, 6, 7, 8, 9 or 10, e.g., 1, 2, or 3.

[0208] In some cases, the peptide linker comprises the amino acid sequence GGGCS (SEQ ID NO:588). In some cases, the peptide linker comprises the amino acid sequence GGGCS(GGGGS)n (SEQ ID NO:589), where n is 1, 2, 3, 4, 5, 6, 7, 8, 9, or 10, e.g., 1, 2, or 3.

[0209] In some cases, the peptide linker comprises the amino acid sequence GGGGC (SEQ ID NO:590). In some cases, the peptide linker comprises the amino acid sequence GGGGC(GGGGS)n (SEQ ID NO:591), where n is 1, 2, 3, 4, 5, 6, 7, 8, 9, or 10, e.g., 1, 2, or 3.

[0210] The following are non-limiting examples of MHC class I heavy chain comprising a Y84C substitution and an A236C substitution, based on the amino acid numbering of HLA-A*0201 (depicted in FIG. 7A), or at corresponding positions in another Class I heavy chain allele.

[0211] HLA-A

[0212] In some cases, a multiple disulfide-linked heterodimeric or single-chain TMP of the present disclosure (e.g., a double disulfide-linked TMP) comprises: i) a KRAS peptide (e.g., a KRAS peptide of from 4 amino acids to 25 amino acids in length, that is bound by a TCR when the peptide is complexed with MHC polypeptides; e.g., where the KRAS peptide comprises a cancer-associated mutation); ii) a first MHC polypeptide; iii) a peptide linker between the peptide and the first MHC polypeptide, where the peptide linker comprises a Cys residue, and where the first MHC polypeptide is a β2M polypeptide that comprises an amino acid substitution that introduces a Cys residue; and iv) a second MHC polypeptide comprising an HLA-A MHC class I heavy chain comprising an amino acid sequence having at least 60%, at least 70%, at least 80%, at least 90%, at least 95%, at least 98%, at least 99%, or 100%, amino acid sequence identity to the amino acid sequence shown in FIG. 22A (SEQ ID NO:143), where amino acid 84 is a Cys and amino acid 236 is a Cys; and where the TMP comprises the at least one immunomodulatory polypeptide. In some cases, the peptide linker comprises the amino acid sequence GCGGS (SEQ ID NO:139). In some cases, the peptide linker comprises the amino acid sequence GCGGS(GGGGS)n (SEQ ID NO: 140), where n is an integer from 1 to 10, e.g., 1, 2 or 3. In some cases, the β2M polypeptide comprises an R12C substitution. For example, the β2M polypeptide can comprises an amino acid sequence having at least 90%, at least 95%, at least 98%, at least 99%, or 100%, amino acid sequence identity to the amino acid sequence of FIG. 21CC (SEQ ID NO:144), where amino acid 12 is a Cys. The at least one immunomodulatory polypeptide can be a wild-type or variant of a immunomodulatory polypeptide, e.g., selected from the group consisting of cytokine (e.g., IL-2), a 4-1BBL polypeptide, a CD80 polypeptide, a CD86 polypeptide, or combinations thereof. In some cases, the at least one immunomodulatory polypeptide is a reduced affinity variant, e.g., a reduced-affinity variant of IL-2, as described elsewhere herein. In some cases, the TMP comprises an Ig Fc polypeptide, e.g., a human IgG1 Fc that substantially does not induce cell lysis such as shown in FIG. 3G.

[0213] In some cases, a multiple disulfide-linked heterodimeric or single-chain TMP of the present disclosure (e.g., a double disulfide-linked TMP) comprises an HLA-A Class I heavy chain polypeptide. In some cases, the HLA-A heavy chain polypeptide present in a multiple disulfide-linked TMP of the present disclosure (e.g., a double disulfide-linked TMP) comprises an amino acid sequence having at least 95%, at least 98%, or at least 99%, amino acid sequence identity to the HLA-A*0101, HLA-A*0201, HLA-A*0202, HLA-A*1101, HLA-A*2301, HLA-A*2402, HLA-A*2407, HLA-A*3303, or HLA-A*3401 amino acid sequence depicted in FIG. 7A, where the HLA-A heavy chain polypeptide comprises Y84C and A236C substitutions.

[0214] In some cases, the HLA-A heavy chain polypeptide present in a multiple disulfide-linked heterodimeric or single-chain TMP of the present disclosure (e.g., a double disulfide-linked TMP) comprises an amino acid sequence having at least 95%, at least 98%, at least 99%, or 100%, amino acid sequence identity to one of the following sequences:

[0215] (i) the HLA-A*0101 (Y84C; A236C) amino acid sequence shown in in FIG. 22B (SEQ ID NO:145), where amino acid 84 is a Cys and amino acid 236 is a Cys;

[0216] (ii) the HLA-A*0201 (Y84C; A236C) amino acid sequence shown in in FIG. 22C (SEQ ID NO:146), where amino acid 84 is a Cys and amino acid 236 is a Cys;

[0217] (iii) the HLA-A*0202 (Y84C; A236C) amino acid sequence shown in FIG. 22D (SEQ ID NO:147), where amino acid 84 is a Cys and amino acid 236 is a Cys;

[0218] (iv) the HLA-A*1101 (Y84C; A236C) amino acid sequence shown in FIG. 22E (SEQ ID NO:148), where amino acid 84 is a Cys and amino acid 236 is a Cys;

[0219] (v) the HLA-A*2301 (Y84C; A236C) amino acid sequence shown in FIG. 22F (SEQ ID NO:149), where amino acid 84 is a Cys and amino acid 236 is a Cys;

[0220] (vi) the HLA-A*2402 (Y84C; A236C) amino acid sequence shown in FIG. 22G (SEQ ID NO:150), where amino acid 84 is a Cys and amino acid 236 is a Cys;

[0221] (vii) the HLA-A*2407 (Y84C; A236C) amino acid sequence shown in FIG. 22H (SEQ ID NO:151), where amino acid 84 is a Cys and amino acid 236 is a Cys;

[0222] (viii) the HLA-A*3303 (Y84C; A236C) amino acid sequence shown in FIG. 22I (SEQ ID NO:152), where amino acid 84 is a Cys and amino acid 236 is a Cys;

[0223] (ix) the HLA-A*3401 (Y84C; A236C) amino acid sequence shown in FIG. 22J (SEQ ID NO:153), where amino acid 84 is a Cys and amino acid 236 is a Cys.

[0224] HLA-B

[0225] In some cases, a multiple disulfide-linked heterodimeric or single-chain TMP of the present disclosure (e.g., a double disulfide-linked TMP) comprises i) a KRAS peptide that is bound by a TCR when the peptide is complexed with MHC polypeptides of the TMP, ii) a β2M polypeptide comprising a non-naturally occurring Cys residue, iii) a peptide linker between the KRAS peptide and the β2M polypeptide, and iv) an HLA-B MHC class I heavy chain polypeptide comprising an amino acid sequence having at least 60%, at least 70%, at least 80%, at least 90%, at least 95%, at least 98%, at least 99%, or 100%, amino acid sequence identity to the following amino acid sequence shown in FIG. 22K (SEQ ID NO:154), where amino acid 84 is a Cys and amino acid 236 is a Cys. In some cases, the peptide linker comprises the amino acid sequence GCGGS (SEQ ID NO:139). In some cases, the peptide linker comprises the amino acid sequence GCGGS(GGGGS)n (SEQ ID NO: 140), where n is an integer from 1 to 10, e.g., 1, 2 or 3. In some cases, the β2M polypeptide comprises an R12C substitution. For example, the β2M polypeptide can comprises an amino acid sequence having at least 90%, at least 95%, at least 98%, at least 99%, or 100%, amino acid sequence identity to the amino acid sequence of FIG. 21CC (SEQ ID NO:155), where amino acid 12 is a Cys. The at least one immunomodulatory polypeptide of the TMP can be a wild-type or variant immunomodulatory polypeptide, e.g., selected from the group consisting of cytokine (e.g., IL-2), 4-1BBL, CD80, CD86 and combinations thereof. In some cases, the at least one immunomodulatory polypeptide is a reduced affinity variant such as an IL-2 variant, as described elsewhere herein. In some cases, the TMP comprises an Ig Fc polypeptide, e.g. a variant human IgG1 Fc polypeptide that substantially does not induce cell lysis.

[0226] In some cases, a multiple disulfide-linked heterodimeric or single-chain TMP of the present disclosure comprises an HLA-B Class I heavy chain polypeptide. In some cases, the HLA-B heavy chain polypeptide present in a multiple disulfide-linked TMP of the present disclosure (e.g., a double disulfide-linked TMP) comprises an amino acid sequence having at least 95%, at least 98%, or at least 99%, amino acid sequence identity to the HLA-B*0702, HLA-B*0801, HLA-B*1502, HLA-B*3802, HLA-B*4001, HLA-B*4601, or HLA-B*5301 amino acid sequence depicted in FIG. 8A, where the HLA-B heavy chain polypeptide comprises Y84C and A236C substitutions.

[0227] HLA-B*0702 (Y84C; A236C)

[0228] In some cases, the HLA-B heavy chain polypeptide present in a multiple disulfide-linked heterodimeric or single-chain TMP of the present disclosure (e.g., a double disulfide-linked TMP) comprises an amino acid sequence having at least 95%, at least 98%, at least 99%, or 100%, amino acid sequence identity to identity to one of the following sequences:

[0229] (i) the HLA-B*0702 (Y84C; A236C) amino acid sequence shown in FIG. 22L (SEQ ID NO:156), where amino acid 84 is a Cys and amino acid 236 is a Cys;

[0230] (ii) the HLA-B*0801 (Y84C; A236C) amino acid sequence shown in FIG. 22M (SEQ ID NO:157), where amino acid 84 is a Cys and amino acid 236 is a Cys;

[0231] (iii) the HLA-B*1502 (Y84C; A236C) amino acid sequence shown in FIG. 22N (SEQ ID NO:158), where amino acid 84 is a Cys and amino acid 236 is a Cys;

[0232] (iv) the HLA-B*3802 (Y84C; A236C) amino acid sequence shown in FIG. 22O (SEQ ID NO:159), where amino acid 84 is a Cys and amino acid 236 is a Cys;

[0233] (v) the HLA-B*4001 (Y84C; A236C) amino acid sequence shown in FIG. 22P (SEQ ID N0:160) where amino acid 84 is a Cys and amino acid 236 is a Cys;

[0234] (vi) the HLA-B*4601 (Y84C; A236C) amino acid sequence shown in FIG. 22Q (SEQ ID N0:161) where amino acid 84 is a Cys and amino acid 236 is a Cys;

[0235] (vii) the HLA-B*5301 (Y84C; A236C) amino acid sequence shown in FIG. 22R (SEQ ID NO:162) where amino acid 84 is a Cys and amino acid 236 is a Cys.

[0236] HLA-C

[0237] In some cases, a multiple disulfide-linked heterodimeric or single-chain TMP of the present disclosure (e.g., a double disulfide-linked TMP) comprises i) a KRAS peptide that is bound by a TCR when the peptide is complexed with MHC polypeptides of the TMP, ii) a β2M polypeptide comprising a non-naturally occurring Cys residue, iii) a peptide linker between the KRAS peptide and the β2M polypeptide, and iv) an HLA-C MHC class I heavy chain comprising an amino acid sequence having at least 60%, at least 70%, at least 80%, at least 90%, at least 95%, at least 98%, at least 99%, or 100%, amino acid sequence identity to the amino acid sequence shown in FIG. 22S (SEQ ID NO:163), where amino acid 84 is a Cys and amino acid 236 is a Cys; and c) at least one immunomodulatory polypeptide, where the first and/or the second polypeptide comprises the at least one immunomodulatory polypeptide. In some cases, the peptide linker comprises the amino acid sequence GCGGS (SEQ ID NO:139). In some cases, the peptide linker comprises the amino acid sequence GCGGS(GGGGS)n (SEQ ID NO: 140), where n is an integer from 1 to 10, e.g., 1, 2 or 3. In some cases, the β2M polypeptide comprises an R12C substitution. For example, the β2M polypeptide can comprises an amino acid sequence having at least 90%, at least 95%, at least 98%, at least 99%, or 100%, amino acid sequence identity to the following amino acid sequence shown in FIG. 21CC (SEQ ID NO:164), where amino acid 12 is a Cys. The at least one immunomodulatory polypeptide can be a wild-type or variant polypeptide immunomodulatory polypeptide, e.g., selected from the group consisting of cytokine (e.g., IL-2), a 4-1BBL polypeptide, a CD80 polypeptide, a CD86 polypeptide, or combinations thereof. In some cases, the at least one immunomodulatory polypeptide is a reduced affinity variant, e.g., a reduced-affinity variant of IL-2, as described elsewhere herein. In some cases, the TMP comprises an Ig Fc polypeptide, e.g. a variant human IgG1 Fc polypeptide that substantially does not induce cell lysis.

[0238] In some cases, a multiple disulfide-linked TMP of the present disclosure (e.g., a double disulfide-linked TMP) comprises an HLA-C Class I heavy chain polypeptide. In some cases, the HLA-C heavy chain polypeptide present in a multiple disulfide-linked TMP of the present disclosure (e.g., a double disulfide-linked TMP) comprises an amino acid sequence having at least 95%, at least 98%, or at least 99%, amino acid sequence identity to the HLA-C*0102, HLA-C*0303, HLA-C*0304, HLA-C*0401, HLA-C*0602, HLA-C*0701, HLA-C*0702, HLA-C*0801, or HLA-C*1502 amino acid sequence depicted in FIG. 9A, where the HLA-C heavy chain polypeptide comprises Y84C and A236C substitutions.

[0239] In some cases, the HLA-C heavy chain polypeptide present in a multiple disulfide-linked TMP of the present disclosure (e.g., a double disulfide-linked TMP) comprises an amino acid sequence having at least 95%, at least 98%, at least 99%, or 100%, amino acid sequence identity to one of the following sequences:

[0240] (i) the HLA-C*01:02 (Y84C; A236C) amino acid sequence shown in FIG. 22T (SEQ ID NO:165), where amino acid 84 is a Cys and amino acid 236 is a Cys;

[0241] (ii) the HLA-C*03:03 (Y84C; A236C) amino acid sequence shown in FIG. 22U (SEQ ID NO:166), where amino acid 84 is a Cys and amino acid 236 is a Cys;

[0242] (iii) the HLA-C*03:04 (Y84C; A236C) amino acid sequence shown in FIG. 22V (SEQ ID NO:167), where amino acid 84 is a Cys and amino acid 236 is a Cys;

[0243] (iv) the HLA-C*04:01 (Y84C; A236C) amino acid sequence shown in FIG. 22W (SEQ ID NO:168), where amino acid 84 is a Cys and amino acid 236 is a Cys;

[0244] (v) the HLA-C*06:02 (Y84C; A236C) amino acid sequence shown in FIG. 22X (SEQ ID NO:169), where amino acid 84 is a Cys and amino acid 236 is a Cys;

[0245] (vi) the HLA-C*07:01 (Y84C; A236C) amino acid sequence shown in FIG. 22Y (SEQ ID NO:170), where amino acid 84 is a Cys and amino acid 236 is a Cys;

[0246] (vii) the HLA-C*07:02 (Y84C; A236C) amino acid sequence shown in FIG. 22Z (SEQ ID NO:171), where amino acid 84 is a Cys and amino acid 236 is a Cys;

[0247] (viii) the HLA-C*08:01 (Y84C; A236C) amino acid sequence shown in FIG. 22AA (SEQ ID NO:172), where amino acid 84 is a Cys and amino acid 236 is a Cys; and

[0248] (ix) the HLA-C*15:02 (Y84C; A236C) amino acid sequence shown in FIG. 22BB (SEQ ID NO: 173), where amino acid 84 is a Cys and amino acid 236 is a Cys.

### Antigen-Presenting, Disulfide-Linked TMPS Mod-Less TMPS)

[0249] The present disclosure provides an antigen-presenting polypeptide (APP) that comprises a heterodimer or single-chain polypeptides (or a homodimer of two such polypeptides), where the APP comprises: i) a KRAS peptide that is bound by a TCR when the peptide is complexed with MHC polypeptides of the TMP, ii) a β2M polypeptide, optionally comprising a non-naturally occurring Cys residue, iii) a peptide linker between the KRAS peptide and the β2M polypeptide, wherein the linker optionally comprises a Cys residue, and iv) an HLA-C MHC class I heavy chain comprising an amino acid sequence having at least 60%, at least 70%, at least 80%, at least 90%, at least 95%, at least 98%, at least 99%, or 100%, amino acid sequence identity to any of the amino acid sequences shown in FIG. 21A-21AA, 21DD-21FF, 21HH-21JJ, or 22A-22BB. The heterodimeric or single-chain APPs can be of the same configuration and can be singly or multiply disulfide linked in the same manner as any of the above singly of multiply disulfide-linked heterodimeric or single-chain TMPs; the only difference being that, unlike the TMPs discussed above, the APPs do not contain MODs. As discussed above, the disulfide linking referred to here is not intended to refer to disulfide linkages between the Ig Fc polypeptides of the APP, e.g., Ig Fc polypeptides that substantially do not induce cell lysis such as the human IgG1 Fc polypeptide of FIG. 3G.

[0250] Examples of heterodimeric APPs include: a) an APP comprising: i) the “4027” polypeptide depicted in FIG. 19O; and ii) the “4030” polypeptide depicted in FIG. 14Q; b) an APP comprising: i) the “4027” polypeptide depicted in FIG. 19O; and ii) the “4029” polypeptide depicted in FIG. 14K. Examples of single-chain APPs include the polypeptides referred to as “4238” (FIG. 19G), “4241” (FIG. 19H), and “4334” (FIG. 19I).

[0251] An APP of the present disclosure is useful for diagnostic applications and therapeutic applications. As discussed below, when used for diagnostic applications, the APP also can comprise a detectable label so that binding of the APP to a target T cell is detected by detecting the detectable label.

[0252] The present disclosure thus provides a method of detecting an antigen-specific T-cell. The methods comprise contacting a T cell with an APP of the present disclosure; and detecting binding of the APP to the T cell. The present disclosure provides a method of detecting an antigen-specific T cell, the method comprising contacting a T cell with an APP of the present disclosure, wherein binding of the APP to the T cell indicates that the T cell is specific for the epitope present in the APP.

[0253] In some cases, the APP comprises a detectable label. Suitable detectable labels include, but are not limited to, a radioisotope, a fluorescent polypeptide, or an enzyme that generates a fluorescent product, and an enzyme that generates a colored product. Where the APP comprises a detectable label, binding of the APP to the T cell is detected by detecting the detectable label.

[0254] In some cases, an APP of the present disclosure comprises a detectable label suitable for use in in vivo imaging, e.g., suitable for use in positron emission tomography (PET), single photon emission tomography (SPECT), near infrared (NIR) optical imaging, x-ray imaging, computer-assisted tomography (CAT), or magnetic resonance imaging (MRI), or other in vivo imaging method. Examples of suitable labels for in vivo imaging include gadolinium chelates (e.g., gadolinium chelates with DTPA (diethylenetriamine penta-acetic acid), DTPA-bismethylamide (BMA), DOTA (dodecane tetraacetic acid), or HP-DO3A (1,4,7-tris(carboxymethyl)-10-(2′-hydroxypropyl)-1,4,7,10-tetraazacyclododecane)), iron chelates, magnesium chelates, manganese chelates, copper chelates, chromium chelates, iodine-based materials, and radionuclides. Suitable radionuclides include, but are not limited to, ¹²³I, ¹²⁵I, ¹³⁰I, ¹³¹I, ¹³³I, ¹³⁵I, ⁴⁷Sc, ⁷²As, ⁷²Se, ⁹⁰Y, ⁸⁸Y, ⁹⁷Ru, ¹⁰⁰Pd, ¹⁰¹mRh, ¹¹⁹Sb, ¹²⁸Ba, ¹⁹⁷Hg, ²¹¹At, ²¹²Bi, ²¹²Pb, ¹⁰⁹Pd, ¹¹¹In, ⁶⁷Ga, ⁶⁸Ga, ⁶⁴Cu, ⁶⁷Cu, ⁷⁵Br, ⁷⁷Br, ⁹⁹mTc, ¹⁴C, ¹³N, ¹⁵O, ³²P, ³³P, and ¹⁸F. In some cases, the detectable label is a positron-emitting isotope such as ¹¹C, ¹³N, ¹⁵O, ¹⁸F, ⁶⁴Cu, ⁶⁸Ga, ⁷⁸Br, ⁸²Rb, ⁸⁶Y, ⁹⁰Y, ²²Na, ²⁶Al, ⁴⁰K, ⁸³Sr, ⁸⁹Zr, or ¹²⁴I. In some cases, the detectable label is ⁶⁴Cu. See, e.g., Woodham, Andrew et al., In vivo detection of antigen-specific CD8+ T cells by immuno-positron emission tomography, Nature Methods Articles (2020) https://doi.org/10.1038/s41592-020-0934-5.

[0255] Suitable fluorescent proteins include, but are not limited to, green fluorescent protein (GFP) or variants thereof, blue fluorescent variant of GFP (BFP), cyan fluorescent variant of GFP (CFP), yellow fluorescent variant of GFP (YFP), enhanced GFP (EGFP), enhanced CFP (ECFP), enhanced YFP (EYFP), GFPS65T, Emerald, Topaz (TYFP), Venus, Citrine, mCitrine, GFPuv, destabilised EGFP (dEGFP), destabilized ECFP (dECFP), destabilized EYFP (dEYFP), mCFPm, Cerulean, T-Sapphire, CyPet, YPet, mKO, HcRed, t-HcRed, DsRed, DsRed2, DsRed-monomer, J-Red, dimer2, t-dimer2(12), mRFP1, pocilloporin, Renilla GFP, Monster GFP, paGFP, Kaede protein and kindling protein, Phycobiliproteins and Phycobiliprotein conjugates including B-Phycoerythrin, R-Phycoerythrin and Allophycocyanin. Other examples of fluorescent proteins include mHoneydew, mBanana, mOrange, dTomato, tdTomato, mTangerine, mStrawberry, mCherry, mGrape1, mRaspberry, mGrape2, mPlum (Shaner et al. (2005) Nat. Methods 2:905-909), and the like. Any of a variety of fluorescent and colored proteins from Anthozoan species, as described in, e.g., Matz et al. (1999) Nature Biotechnol. 17:969-973, is suitable for use.

[0256] Suitable enzymes include, but are not limited to, horse radish peroxidase (HRP), alkaline phosphatase (AP), beta-galactosidase (GAL), glucose-6-phosphate dehydrogenase, beta-N-acetylglucosaminidase, β-glucuronidase, invertase, Xanthine Oxidase, firefly luciferase, glucose oxidase (GO), and the like.

[0257] In some cases, binding of the APP to the T cell is detected using a detectably labeled antibody specific for the APP. An antibody specific for the APP can comprise a detectable label such as a radioisotope, a fluorescent polypeptide, or an enzyme that generates a fluorescent product, or an enzyme that generates a colored product.

[0258] In some cases, the T cell being detected is present in a sample comprising a plurality of T cells. For example, a T cell being detected can be present in a sample comprising from 10 to 10⁹ T cells, e.g., from 10 to 10², from 10² to 10⁴, from 10⁴ to 10⁶, from 10⁶ to 10⁷, from 10⁷ to 10⁸, or from 10⁸ to 10⁹, or more than 10⁹, T cells.

### HLA/Peptide Binding Assays

[0259] Whether a given peptide (e.g., a KRAS peptide that comprises a KRAS epitope) binds a class I HLA (comprising an HLA heavy chain and a β2M polypeptide), and, when bound to the HLA complex, can effectively present an epitope to a TCR, can be determined using any of a number of well-known methods. Assays include binding assays and T-cell activation assays, including cell-based binding assays, biochemical binding assays, T-cell activation assays, ELISPOT assays, cytotoxicity assays and Detection of Antigen-specific T cells with peptide-HLA tetramers. Such assays are described in the published scientific literature as well as in published PCT application WO2020132138A1, the disclosure of which as it pertains to specific binding assays is expressly incorporated herein by reference, including specifically paragraphs [00217]-[00225].

[0260] As another example, multimers (e.g., tetramers) of peptide-HLA complexes are generated with fluorescent or heavy metal tags. The multimers can then be used to identify and quantify specific T cells via flow cytometry (FACS) or mass cytometry (CyTOF). Detection of epitope-specific T cells provides direct evidence that the peptide-bound HLA molecule is capable of binding to a specific TCR on a subset of antigen-specific T cells. See, e.g., Klenerman et al. (2002) Nature Reviews Immunol. 2:263.

### Immunomodulatory Polypeptides

[0261] In some cases, an immunomodulatory polypeptide or “MOD” present in a TMP of the present disclosure is a wild-type immunomodulatory polypeptide. In other cases, an immunomodulatory polypeptide present in a TMP of the present disclosure is a variant immunomodulatory polypeptide that has reduced affinity for a costimulatory polypeptide, compared to the affinity of a corresponding wild-type immunomodulatory polypeptide for the costimulatory polypeptide. Suitable immunomodulatory domains that exhibit reduced affinity for a costimulatory domain can have from 1 amino acid (aa) to 20 aa differences from a wild-type immunomodulatory domain. For example, in some cases, a variant immunomodulatory polypeptide present in a TMP of the present disclosure differs in amino acid sequence by 1 aa, 2 aa, 3 aa, 4 aa, 5 aa, 6 aa, 7 aa, 8 aa, 9 aa, or 10 aa, from a corresponding wild-type immunomodulatory polypeptide. As another example, in some cases, a variant immunomodulatory polypeptide present in a TMP of the present disclosure differs in amino acid sequence by 11 aa, 12 aa, 13 aa, 14 aa, 15 aa, 16 aa, 17 aa, 18 aa, 19 aa, or 20 aa, from a corresponding wild-type immunomodulatory polypeptide.

[0262] Exemplary pairs of immunomodulatory polypeptides and their cognate costimulatory polypeptides include, but are not limited to those set out in Table 1, below:

TABLE 1

| Immunomodulatory | Cognate Costimulatory |
|---|---|
| Polypeptide (MOD) | Polypeptide |
| 4-1BBL | 4-1BB |
| PD-L1 | PD-1 |
| IL-2 | IL-2 receptor |
| CD80 | CD28 |
| CD86 | CD28 |
| OX40L (CD252) | OX40 (CD134) |
| Fas ligand | Fas |
| ICOS-L | ICOS |
| ICAM | LFA-1 |
| CD30L | CD30 |
| CD40 | CD40L |
| CD83 | CD83L |
| HVEM (CD270) | CD160 |
| JAG1 (CD339) | Notch |
| JAG1 | CD46 |
| CD80 | CTLA4 |
| CD86 | CTLA4 |
| CD70 | CD27 |
| TGFβ | TGFβ receptor |

[0263] In some cases, a variant immunomodulatory polypeptide present in a TMP of the present disclosure has a binding affinity for a cognate costimulatory polypeptide that is from 100 nM to 100 μM. For example, in some cases, a variant immunomodulatory polypeptide present in a TMP of the present disclosure has a binding affinity for a cognate costimulatory polypeptide that is from about 100 nM to 150 nM, from about 150 nM to about 200 nM, from about 200 nM to about 250 nM, from about 250 nM to about 300 nM, from about 300 nM to about 350 nM, from about 350 nM to about 400 nM, from about 400 nM to about 500 nM, from about 500 nM to about 600 nM, from about 600 nM to about 700 nM, from about 700 nM to about 800 nM, from about 800 nM to about 900 nM, from about 900 nM to about 1 μM, to about 1 μM to about 5 μM, from about 5 μM to about 10 μM, from about 10 μM to about 15 μM, from about 15 μM to about 20 μM, from about 20 μM to about 25 μM, from about 25 μM to about 50 μM, from about 50 μM to about 75 μM, or from about 75 μM to about 100 μM.

[0264] A variant immunomodulatory polypeptide present in a TMP of the present disclosure exhibits reduced affinity for a cognate costimulatory polypeptide. Similarly, a TMP of the present disclosure that comprises a variant immunomodulatory polypeptide exhibits reduced affinity for a cognate costimulatory polypeptide. Thus, for example, a TMP of the present disclosure that comprises a variant immunomodulatory polypeptide has a binding affinity for a cognate costimulatory polypeptide that is from 100 nM to 100 μM. For example, in some cases, a TMP of the present disclosure that comprises a variant immunomodulatory polypeptide has a binding affinity for a cognate costimulatory polypeptide that is from about 100 nM to 150 nM, from about 150 nM to about 200 nM, from about 200 nM to about 250 nM, from about 250 nM to about 300 nM, from about 300 nM to about 350 nM, from about 350 nM to about 400 nM, from about 400 nM to about 500 nM, from about 500 nM to about 600 nM, from about 600 nM to about 700 nM, from about 700 nM to about 800 nM, from about 800 nM to about 900 nM, from about 900 nM to about 1 μM, to about 1 μM to about 5 μM, from about 5 μM to about 10 μM, from about 10 μM to about 15 μM, from about 15 μM to about 20 μM, from about 20 μM to about 25 μM, from about 25 μM to about 50 μM, from about 50 μM to about 75 μM, or from about 75 μM to about 100 μM.

[0265] As depicted schematically in FIG. 17, an immunomodulatory polypeptide (i.e., one or more immunomodulatory polypeptides) can be present in a heterodimeric TMP of the present disclosure at any of a variety of positions. FIG. 17 depicts the position of two copies of a variant IL-2 polypeptide; however, the immunomodulatory polypeptide can be any number of and any of a variety of immunomodulatory polypeptides, as described herein. As depicted in FIG. 17, an immunomodulatory polypeptide can be: 1) N-terminal to the MHC class I heavy chain; 2) C-terminal to the MHC class I heavy chain and N-terminal to the Ig Fc polypeptide; in other words, between the MHC class I heavy chain and the Ig Fc polypeptide; 3) C-terminal to the Ig Fc polypeptide; 4) N-terminal to the peptide epitope; or 5) C-terminal to the β2M polypeptide.

[0266] As depicted schematically in FIG. 18, an immunomodulatory polypeptide (i.e., one or more immunomodulatory polypeptides) can be present in a single-chain TMP of the present disclosure at any of a variety of positions. FIG. 18 depicts the position of two copies of a variant IL-2 polypeptide; however, the immunomodulatory polypeptide can be any number of and any of a variety of immunomodulatory polypeptides, as described herein. As depicted in FIG. 18, an immunomodulatory polypeptide can be: 1)_{C}-terminal to the MHC class I heavy chain and N-terminal to the Ig Fc polypeptide; 2)_{C}-terminal to the Ig Fc polypeptide; or 3)N-terminal to the peptide epitope.

[0267] Immunomodulatory polypeptides and variants, including reduced affinity variants, such as PD-L1, CD80, CD86, 4-1BBL and IL-2 are described in the published literature, e.g., published PCT application WO2020132138A1 and WO2019/051091, the disclosures of which as they pertain to immunomodulatory polypeptides and specific variant immunomodulatory polypeptides of PD-L1, CD80, CD86, 4-1BBL, IL-2 are expressly incorporated herein by reference, including specifically paragraphs [00260]-[00455] of WO2020132138A1 and paragraphs [00157]-[00352] of WO2019/051091.

[0268] Of specific interest are MODs that are variants of the cytokine IL-2. Wild-type IL-2 binds to IL-2 receptor (IL-2R) on the surface of a T cell. Wild-type IL-2 has a strong affinity for IL-2R and will bind to activate most or substantially all CD8⁺ T cells. For this reason, synthetic forms of wt. 11-2 such as the drug Aldesleukin (trade name Proleukin®) are known to have severe side-effects when administered to humans for the treatment of cancer because the IL-2 indiscriminately activates both target and non-target T cells.

[0269] An IL-2 receptor is in some cases a heterotrimeric polypeptide comprising an alpha chain (IL-2Rα; also referred to as CD25), a beta chain (IL-2Rβ; also referred to as CD122: and a gamma chain (IL-2Rγ; also referred to as CD132). Amino acid sequences of human IL-2 (SEQ ID NO: 15), human IL-2Rα (SEQ ID NO: 16), IL2Rβ (SEQ ID NO: 17), and IL-2Rγ (SEQ ID NO: 18) are known. See, e.g., published PCT applications WO2020132138A1 and WO2019/051091, discussed above.

[0270] In some cases, an IL-2 variant MOD of this disclosure exhibits substantially reduced or no binding to IL-2Rα, thereby minimizing or substantially reducing the activation of Tregs by the IL-2 variant. In some cases, an IL-2 variant MOD of this disclosure has reduced affinity to IL-2RB and/or IL-2Ry such that the IL-2 variant MOD exhibits an overall reduced affinity for IL-2R. In some cases, an IL-2 variant MOD of this disclosure exhibits both properties, i.e., it exhibits substantially reduced or no binding to IL-2Rα, and also has reduced affinity to IL-2RB and/or IL-2Rγ such that the IL-2 variant polypeptide exhibits an overall reduced affinity for IL-2R. TMPs comprising such variants, including variants that substantially do not bind IL-2Rα and have reduced affinity to IL-2RB, have shown the ability to preferentially bind to and activate IL-2 receptors on T cells that contain the target TCR that is specific for the peptide epitope on the TMP, and are thus less likely to deliver IL-2 to non-target T cells, i.e., T cells that do not contain a TCR that specifically binds the peptide epitope on the TMP. That is, the binding of the IL-2 variant MOD to its costimulatory polypeptide on the T cell is substantially driven by the binding of the MHC-epitope moiety rather than by the binding of the 11-2.

[0271] Suitable IL-2 variant MODs thus include a polypeptide that comprises an amino acid sequence having at least 90%, at least 95%, at least 98%, at least 99% amino acid sequence identity to the amino acid sequence set forth in SEQ ID NO:15 for an IL-2R. In some cases, such a variant IL-2 polypeptide of this disclosure exhibits reduced binding affinity to IL-2R, compared to the binding affinity of a IL-2 polypeptide comprising the amino acid sequence set forth in SEQ ID NO:15. For example, in some cases, a variant IL-2 polypeptide binds IL-2R with a binding affinity that is at least 10% less, at least 15% less, at least 20% less, at least 25%, at least 30% less, at least 35% less, at least 40% less, at least 45% less, at least 50% less, at least 55% less, at least 60% less, at least 65% less, at least 70% less, at least 75% less, at least 80% less, at least 85% less, at least 90% less, at least 95% less, or more than 95% less, than the binding affinity of an IL-2 polypeptide comprising the amino acid sequence set forth in SEQ ID NO:15 for an IL-2R (e.g., an IL-2R comprising polypeptides comprising the amino acid sequence set forth in SEQ ID NOs:16-18), when assayed under the same conditions. In some cases, such a variant IL-2 polypeptide has a binding affinity to IL-2R that is from 100 nM to 100 μM. As another example, in some cases, a variant IL-2 polypeptide has a binding affinity for IL-2R (e.g., an IL-2R comprising polypeptides comprising the amino acid sequence set forth in SEQ ID NOs:16-18) that is from about 100 nM to 150 nM, from about 150 nM to about 200 nM, from about 200 nM to about 250 nM, from about 250 nM to about 300 nM, from about 300 nM to about 350 nM, from about 350 nM to about 400 nM, from about 400 nM to about 500 nM, from about 500 nM to about 600 nM, from about 600 nM to about 700 nM, from about 700 nM to about 800 nM, from about 800 nM to about 900 nM, from about 900 nM to about 1 μM, to about 1 μM to about 5 μM, from about 5 μM to about 10 μM, from about 10 μM to about 15 μM, from about 15 μM to about 20 μM, from about 20 μM to about 25 μM, from about 25 μM to about 50 μM, from about 50 μM to about 75 μM, or from about 75 μM to about 100 μM.

[0272] In some cases, a suitable variant IL-2 polypeptide comprises an amino acid sequence having at least 90%, at least 95%, at least 98%, at least 99%, or 100% amino acid sequence identity to the amino acid sequence: APTSSSTKKT QLQLEALLLD LQMILNGINN YKNPKLTRML TAKFYMPKKA TELKHLQCLEEELKPLEEVL NLAQSKNFHL RPRDLISNIN VIVLELKGSE TTFMCEYADE TATIVEFLNRWITFCQSIIS TLT (SEQ ID NO: 241), i.e., the variant IL-2 polypeptide has the amino acid sequence of wild-type IL-2 but with H16A and F42A substitutions (shown in bold). Alternatively, the foregoing sequence but substitutions other than Ala at H16 and/or F42 may be employed, e.g., H16T may be employed instead of H16A.

### Scaffold Polypeptides

[0273] A TMP of the present disclosure can comprise an Fc polypeptide or can comprise another suitable scaffold polypeptide.

[0274] Suitable scaffold polypeptides include antibody-based scaffold polypeptides and non-antibody-based scaffolds. Non-antibody-based scaffolds include, e.g., albumin, an XTEN (extended recombinant) polypeptide, transferrin, an Fc receptor polypeptide, an elastin-like polypeptide (see, e.g., Hassouneh et al. (2012) Methods Enzymol. 502:215; e.g., a polypeptide comprising a pentapeptide repeat unit of (Val-Pro-Gly-X-Gly; SEQ ID NO:561), where X is any amino acid other than proline), an albumin-binding polypeptide, a silk-like polypeptide (see, e.g., Valluzzi et al. (2002) Philos Trans R Soc Lond B Biol Sci. 357:165), a silk-elastin-like polypeptide (SELP; see, e.g., Megeed et al. (2002) Adv Drug Deliv Rev. 54:1075), and the like. Suitable XTEN polypeptides include, e.g., those disclosed in WO 2009/023270, WO 2010/091122, WO 2007/103515, US 2010/0189682, and US 2009/0092582; see also Schellenberger et al. (2009) Nat Biotechnol. 27:1186). Suitable albumin polypeptides include, e.g., human serum albumin.

[0275] Suitable scaffold polypeptides will in some cases be a half-life extending polypeptides. Thus, in some cases, a suitable scaffold polypeptide increases the in vivo half-life (e.g., the serum half-life) of the TMP, compared to a control TMP lacking the scaffold polypeptide. For example, in some cases, a scaffold polypeptide increases the in vivo half-life (e.g., the serum half-life) of the TMP, compared to a control TMP lacking the scaffold polypeptide, by at least about 10%, at least about 15%, at least about 20%, at least about 25%, at least about 50%, at least about 2-fold, at least about 2.5-fold, at least about 5-fold, at least about 10-fold, at least about 25-fold, at least about 50-fold, at least about 100-fold, or more than 100-fold. As an example, in some cases, an Fc polypeptide increases the in vivo half-life (e.g., the serum half-life) of the TMP, compared to a control TMP lacking the Fc polypeptide, by at least about 10%, at least about 15%, at least about 20%, at least about 25%, at least about 50%, at least about 2-fold, at least about 2.5-fold, at least about 5-fold, at least about 10-fold, at least about 25-fold, at least about 50-fold, at least about 100-fold, or more than 100-fold.

[0276] Fc Polypeptides

[0277] In some cases, the first and/or the second polypeptide chain of a TMP of the present disclosure comprises an Fc polypeptide. The Fc polypeptide of a TMP of the present disclosure can be a human IgG1 Fc, a human IgG2 Fc, a human IgG3 Fc, a human IgG4 Fc, etc. In some cases, the Fc polypeptide comprises an amino acid sequence having at least about 70%, at least about 75%, at least about 80%, at least about 85%, at least about 90%, at least about 95%, at least about 98%, at least about 99%, or 100%, amino acid sequence identity to an amino acid sequence of an Fc region depicted in FIG. 3A-3G. In some cases, the Fc region comprises an amino acid sequence having at least about 70%, at least about 75%, at least about 80%, at least about 85%, at least about 90%, at least about 95%, at least about 98%, at least about 99%, or 100%, amino acid sequence identity to the human IgG1 Fc polypeptide depicted in FIG. 3A, optionally comprising a substitution of N77; e.g., the Fc polypeptide comprises an N77A substitution. In some cases, the Fc polypeptide comprises an amino acid sequence having at least about 70%, at least about 75%, at least about 80%, at least about 85%, at least about 90%, at least about 95%, at least about 98%, at least about 99%, or 100%, amino acid sequence identity to the human IgG2 Fc polypeptide depicted in FIG. 3A; e.g., the Fc polypeptide comprises an amino acid sequence having at least about 70%, at least about 75%, at least about 80%, at least about 85%, at least about 90%, at least about 95%, at least about 98%, at least about 99%, or 100%, amino acid sequence identity to amino acids 99-325 of the human IgG2 Fc polypeptide depicted in FIG. 3A. In some cases, the Fc polypeptide comprises an amino acid sequence having at least about 70%, at least about 75%, at least about 80%, at least about 85%, at least about 90%, at least about 95%, at least about 98%, at least about 99%, or 100%, amino acid sequence identity to the human IgG3 Fc polypeptide depicted in FIG. 3A; e.g., the Fc polypeptide comprises an amino acid sequence having at least about 70%, at least about 75%, at least about 80%, at least about 85%, at least about 90%, at least about 95%, at least about 98%, at least about 99%, or 100%, amino acid sequence identity to amino acids 19-246 of the human IgG3 Fc polypeptide depicted in FIG. 3A. In some cases, the Fc polypeptide comprises an amino acid sequence having at least about 70%, at least about 75%, at least about 80%, at least about 85%, at least about 90%, at least about 95%, at least about 98%, at least about 99%, or 100%, amino acid sequence identity to the human IgM Fc polypeptide depicted in FIG. 3B; e.g., the Fc polypeptide comprises an amino acid sequence having at least about 70%, at least about 75%, at least about 80%, at least about 85%, at least about 90%, at least about 95%, at least about 98%, at least about 99%, or 100%, amino acid sequence identity to amino acids 1-276 to the human IgM Fc polypeptide depicted in FIG. 3B. In some cases, the Fc polypeptide comprises an amino acid sequence having at least about 70%, at least about 75%, at least about 80%, at least about 85%, at least about 90%, at least about 95%, at least about 98%, at least about 99%, or 100%, amino acid sequence identity to the human IgA Fc polypeptide depicted in FIG. 3C; e.g., the Fc polypeptide comprises an amino acid sequence having at least about 70%, at least about 75%, at least about 80%, at least about 85%, at least about 90%, at least about 95%, at least about 98%, at least about 99%, or 100%, amino acid sequence identity to amino acids 1-234 to the human IgA Fc polypeptide depicted in FIG. 3C.

[0278] In some cases, the Fc polypeptide comprises an amino acid sequence having at least about 70%, at least about 75%, at least about 80%, at least about 85%, at least about 90%, at least about 95%, at least about 98%, at least about 99%, or 100%, amino acid sequence identity to the human IgG4 Fc polypeptide depicted in FIG. 3C. In some cases, the Fc polypeptide comprises an amino acid sequence having at least about 70%, at least about 75%, at least about 80%, at least about 85%, at least about 90%, at least about 95%, at least about 98%, at least about 99%, or 100%, amino acid sequence identity to amino acids 100 to 327 of the human IgG4 Fc polypeptide depicted in FIG. 3C.

[0279] In some cases, the IgG4 Fc polypeptide comprises the following amino acid sequence:

(SEQ ID NO: 175)
PPCPSCPAPEFLGGPSVFLFPPKPKDTLMISRTPEVTCVVVDVSQEDPE
VQFNWYVDGVEVHNAKTKPREEQFNSTYRVVSVLTVLHQDWLNGKEYKC
KVSNKGLPSSIEKTISKAKGQPREPQVYTLPPSQEEMTKNQVSLTCLVK
GFYPSDIAVEWESNGQPENNYKTTPPVLDSDGSFFLYSRLTVDKSRWQE
GNVFSCSVMHEALHNHYTQKSLSLSPG.

[0280] Typically, the Ig Fc employed in the TMP will comprise one or more substitutions for amino acids in the wild-type sequence the such that that Ig Fc that “substantially does not induce cell lysis. For example, in some cases the Fc polypeptide present in a TMP comprises the amino acid sequence depicted in FIG. 3A (human IgG1 Fc), except for a substitution of L234 (L14 of the amino acid sequence depicted in FIG. 3A) with an amino acid other than leucine, or a substitution of L235 (L15 of the amino acid sequence depicted in FIG. 3A) with an amino acid other than leucine.

[0281] In some cases, the Fc polypeptide present in a TMP comprises the amino acid sequence depicted in FIG. 3G (human IgG1 Fc comprising an L234A substitution and an L235A substitution, corresponding to positions 14 and 15 of the amino acid sequence depicted in FIG. 3G). In some cases, the Fc polypeptide present in a TMP comprises the amino acid sequence depicted in FIG. 3A (human IgG1 Fc), except for substitutions at L234 and L235 (L14 and L15 of the amino acid sequence depicted in FIG. 3A) with amino acids other than leucine. In some cases, the Fc polypeptide present in a TMP comprises the amino acid sequence depicted in FIG. 3A (human IgG1 Fc), except for substitutions at L234 and L235 (L14 and L15 of the amino acid sequence depicted in FIG. 3A) with amino acids other than leucine, and a substitution of P331 (P111 of the amino acid sequence depicted in FIG. 3A) with an amino acid other than proline. In some cases, the Fc polypeptide present in a TMP comprises the amino acid sequence depicted in FIG. 3E (human IgG1 Fc comprising L234F, L235E, and P331S substitutions (corresponding to amino acid positions 14, 15, and 111 of the amino acid sequence depicted in FIG. 3E). In some cases, the Fc polypeptide present in a TMP is an IgG1 Fc polypeptide that comprises L234A and L235A substitutions (substitutions of L14 and L15 of the amino acid sequence depicted in FIG. 3A with Ala), as depicted in FIG. 3G.

### Linkers

[0282] A TMP of the present disclosure can include one or more linkers, where the one or more linkers are between one or more of: i) an MHC class I polypeptide and an Ig Fc polypeptide, where such a linker is referred to herein as “L1”; ii) an immunomodulatory polypeptide and an MHC class I polypeptide, where such a linker is referred to herein as “L2”; iii) a first immunomodulatory polypeptide and a second immunomodulatory polypeptide, where such a linker is referred to herein as “L3”; iv) a peptide antigen (“epitope”) and an MHC class I polypeptide; v) an MHC class I polypeptide and a dimerization polypeptide (e.g., a first or a second member of a dimerizing pair); and vi) a dimerization polypeptide (e.g., a first or a second member of a dimerizing pair) and an Ig Fc polypeptide.

[0283] Suitable linkers (also referred to as “spacers”) can be readily selected and can be of any of a number of suitable lengths, such as from 1 amino acid to 25 amino acids, from 3 amino acids to 20 amino acids, from 2 amino acids to 15 amino acids, from 3 amino acids to 12 amino acids, including 4 amino acids to 10 amino acids, 5 amino acids to 9 amino acids, 6 amino acids to 8 amino acids, or 7 amino acids to 8 amino acids. A suitable linker can be 1, 2, 3, 4, 5, 6, 7, 8, 9, 10, 11, 12, 13, 14, 15, 16, 17, 18, 19, 20, 21, 22, 23, 24, or 25 amino acids in length. In some cases, a linker has a length of from 25 amino acids to 50 amino acids, e.g., from 25 to 30, from 30 to 35, from 35 to 40, from 40 to 45, or from 45 to 50 amino acids in length.

[0284] Exemplary linkers include glycine polymers (G)ₙ, glycine-serine polymers (including, for example, (GS)ₙ, (GSGGS)ₙ (SEQ ID NO:366), and (GGGS)ₙ (SEQ ID NO:367), where n is an integer of at least one), glycine-alanine polymers, alanine-serine polymers, and other flexible linkers known in the art. Glycine and glycine-serine polymers can be used; both Gly and Ser are relatively unstructured, and therefore can serve as a neutral tether between components. Glycine polymers can be used; glycine accesses significantly more phi-psi space than even alanine, and is much less restricted than residues with longer side chains (see Scheraga, Rev. Computational Chem. 11173-142 (1992)). Exemplary linkers can comprise amino acid sequences including, but not limited to, GGSG (SEQ ID NO:368), GGSGG (SEQ ID NO: 369), GSGSG (SEQ ID NO:370), GSGGG (SEQ ID NO:371), GGGSG (SEQ ID NO:372), GSSSG (SEQ ID NO:373), and the like. Exemplary linkers can include, e.g., Gly(Ser₄)n (SEQ ID NO: 374), where n is 1, 2, 3, 4, 5, 6, 7, 8, 9, or 10. In some cases, a linker comprises the amino acid sequence (GSSSS)n (SEQ ID NO:375), where n is 4. In some cases, a linker comprises the amino acid sequence (GSSSS)n (SEQ ID NO:376), where n is 5.

[0285] Exemplary linkers can include, e.g., (GGGGS)n (SEQ ID NO:377); also referred to as a “G45” linker), where n is 1, 2, 3, 4, 5, 6, 7, 8, 9, or 10. In some cases, a linker comprises the amino acid sequence (GGGGS)n (SEQ ID NO:377), where n is 1, 2, 3, 4, 5, 6, 7, 8, 9 or 10. In some cases, a linker comprises the amino acid sequence AAAGG (SEQ ID NO:387). Also suitable is a linker having the amino acid sequence AAAGG (SEQ ID NO:387). In single-chain TMPs of this disclosure, the B2M polypeptide can be connected to the MHC heavy chain polypeptide by a (GGGGS)n (SEQ ID NO:377) linker, where n is 1, 2, 3, 4, 5, 6, 7, 8, 9, or 10, e.g., with n=3 or 7.

[0286] In some cases, a linker polypeptide, present in a first polypeptide of a TMP of the present disclosure, includes a cysteine residue that can form a disulfide bond with a cysteine residue present in a second polypeptide of a TMP of the present disclosure. In some cases, for example, a suitable linker comprises the amino acid sequence GCGGSGGGGSGGGGS (SEQ ID NO:388). As another example, a suitable linker can comprise the amino acid sequence GCGGS(GGGGS)n (SEQ ID NO:389), where n is 1, 2, 3, 4, 5, 6, 7, 8, or 9. For example, in some cases, the linker comprises the amino acid sequence GCGGSGGGGSGGGGSGGGGS (SEQ ID NO:390). As another example, the linker comprises the amino acid sequence GCGGSGGGGSGGGGS (SEQ ID NO:391).

### Dimerized TMPS

[0287] In some cases, single-chain and heterodimeric TMPs of the present disclosure can form dimers; i.e., the present disclosure provides a polypeptide comprising a dimer of a TMP of the present disclosure. The present disclosure provides, e.g., a protein (a dimerized TMP of the present disclosure) comprising: A) a first heterodimer comprising: a) a first polypeptide comprising: i) a KRAS peptide; and ii) a first MHC polypeptide; and b) a second polypeptide comprising: i) a second MHC polypeptide, wherein the first heterodimer comprises one or more immunomodulatory polypeptides; and B) a second heterodimer comprising: a) a first polypeptide comprising: i) a KRAS peptide; and ii) a first MHC polypeptide; and b) a second polypeptide comprising: i) a second MHC polypeptide, wherein the second heterodimer comprises one or more immunomodulatory polypeptides, and wherein the first heterodimer and the second heterodimer are covalently linked to one another. Alternatively, the dimerized TMP can comprise two single-chain TMPs that are covalently linked to each other. The covalent linkage of the dimer can be a disulfide bond between an Ig Fc polypeptide in the first single-chain or heterodimeric TMP and an Ig Fc polypeptide in the second single-chain or heterodimeric TMP. When the TMP comprises an Ig Fc polypeptide, e.g., a human IgG1 Fc polypeptide that substantially does not induce cell lysis (e.g., the polypeptide of FIG. 3G), the TMP typically will self-assemble into a dimer by spontaneously forming disulfide bonds with the IgG1 Fc polypeptide of another TMP. Thus, e.g., the Ig Fc polypeptides in the first single-chain or heterodimeric TMP and the second single-chain or heterodimer can be linked to one another by one or more disulfide bonds. In some cases, the two TMPs are identical to one another in amino acid sequence. In some cases, the first heterodimer and the second heterodimer are covalently linked to one another via a C-terminal region of the second polypeptide of the first heterodimer and a C-terminal region of the second polypeptide of the second heterodimer. In some cases, first heterodimer and the second heterodimer are covalently linked to one another via the C-terminal amino acid of the second polypeptide of the first heterodimer and the C-terminal region of the second polypeptide of the second heterodimer; for example, in some cases, the C-terminal amino acid of the second polypeptide of the first heterodimer and the C-terminal region of the second polypeptide of the second heterodimer are linked to one another, either directly or via a linker. The linker can be a peptide linker. The peptide linker can have a length of from 1 amino acid to 200 amino acids (e.g., from 1 amino acid (aa) to 5 aa, from 5 aa to 10 aa, from 10 aa to 25 aa, from 25 aa to 50 aa, from 50 aa to 100 aa, from 100 aa to 150 aa, or from 150 aa to 200 aa). In some cases, the peptide epitope of the first heterodimer and the peptide epitope of the second heterodimer comprise the same amino acid sequence. In some cases, the first MHC polypeptide of the first and the second heterodimer is an MHC class I β2-microglobulin, and wherein the second MHC polypeptide of the first and the second heterodimer is an MHC class I heavy chain. In some cases, the immunomodulatory polypeptide of the first heterodimer and the immunomodulatory polypeptide of the second heterodimer comprise the same amino acid sequence. In some cases, the immunomodulatory polypeptide of the first heterodimer and the immunomodulatory polypeptide of the second heterodimer are variant immunomodulatory polypeptides that comprise from 1 to 10 amino acid substitutions compared to a corresponding parental wild-type immunomodulatory polypeptide, and wherein the from 1 to 10 amino acid substitutions result in reduced affinity binding of the variant immunomodulatory polypeptide to a cognate costimulatory polypeptide. In some cases, the immunomodulatory polypeptide of the first heterodimer and the immunomodulatory polypeptide of the second heterodimer are each independently selected from the group consisting of wild-type and variant polypeptides of IL-2, 4-1BBL, PD-L1, CD80, CD86, ICOS-L, OX-40L, FasL, JAG1 (CD339), TGFβ, CD70, and ICAM. Examples, of suitable MHC polypeptides, immunomodulatory polypeptides, and peptide epitopes are described herein.

[0288] In some cases, a single-chain TMP of the present disclosure is dimerized. Thus, the present disclosure provides a protein comprising: a) a first single-chain TMP of the present disclosure; and b) a second single-chain TMP of the present disclosure, where the first and second single-chain TMPs are covalently linked to one another. The covalent linkage can be a disulfide bond between an Ig Fc polypeptide in the first single-chain TMP and an Ig Fc polypeptide in the second single-chain TMP.

### Additional Polypeptides

[0289] A polypeptide chain of a TMP of the present disclosure can include one or more polypeptides and conjugate drugs in addition to those described above. Suitable additional polypeptides, including epitope tags and affinity domains, and drug conjugates are described in in published PCT applications WO2020132138A1 and WO2019/051091, discussed above, the disclosures of which as they pertain to epitope tags, affinity domains and drug conjugates are expressly incorporated herein by reference, including specifically paragraphs [00498]-[00508] of WO2020132138A1 and paragraphs [00353]-[00363] of WO2019/051091. The one or more additional polypeptide can be included at the N-terminus of a polypeptide chain of a TMP, at the C-terminus of a polypeptide chain of a TMP, or internally within a polypeptide chain of a TMP.

### Exemplary TMPS

[0290] In some cases, a TMP of the present disclosure comprises at least one heterodimer comprising: a) a first polypeptide comprising: i) a KRAS peptide; and ii) first MHC polypeptide; b) a second polypeptide comprising a second MHC polypeptide, and c) at least one immunomodulatory polypeptide, where the first and/or the second polypeptide comprises the immunomodulatory polypeptide, and optionally comprises an Ig Fc. Thus, in some cases, a TMP of the present disclosure comprises at least one heterodimer comprising: a) a first polypeptide comprising: i) a KRAS peptide; ii) first MHC polypeptide; and iii) at least one immunomodulatory polypeptide; and b) a second polypeptide comprising a second MHC polypeptide and optionally comprises an Ig Fc. In other instances, a TMP of the present disclosure comprises at least one heterodimer comprising: a) a first polypeptide comprising: i) a KRAS peptide; and ii) first MHC polypeptide; and b) a second polypeptide comprising: i) a second MHC polypeptide; and ii) at least one immunomodulatory polypeptide, and optionally comprises an Ig Fc. In some cases, a TMP of the present disclosure comprises at least one heterodimer comprising: a) a first polypeptide comprising: i) a KRAS peptide; ii) first MHC polypeptide; and iii) at least one immunomodulatory polypeptide; and b) a second polypeptide comprising: i) a second MHC polypeptide; and ii) at least one immunomodulatory polypeptide, and optionally comprises an Ig Fc. In some cases, the at least one immunomodulatory polypeptide is a wild-type immunomodulatory polypeptide. In other cases, the at least one immunomodulatory polypeptide is a variant immunomodulatory polypeptide that exhibits reduced affinity for a costimulatory polypeptide, compared to the affinity of a corresponding wild-type immunomodulatory polypeptide for the costimulatory polypeptide.

[0291] As noted above, and as depicted schematically in FIG. 17, an immunomodulatory polypeptide (i.e., one or more immunomodulatory polypeptides) can be present in a TMP of the present disclosure at any of a variety of positions. FIG. 17 depicts the position of two copies of a variant IL-2 polypeptide; however, the immunomodulatory polypeptide can be any number of and any of a variety of immunomodulatory polypeptide, as described herein. As depicted in FIG. 17, an immunomodulatory polypeptide can be: 1)N-terminal to the MHC class I heavy chain (position 1); 2)_{C}-terminal to the MHC class I heavy chain and N-terminal to the Ig Fc polypeptide; in other words, between the MHC class I heavy chain and the Ig Fc polypeptide (position 2); 3)_{C}-terminal to the Ig Fc polypeptide (position 3); 4)N-terminal to the peptide epitope (position 4); or 5)_{C}-terminal to the β2M polypeptide (position 5). In some cases, therefore, a TMP of the present disclosure comprises one of the following scaffolds having the defined arrangements of components, wherein the first MHC polypeptide is a β2M polypeptide; and the second MHC polypeptide is an HLA heavy chain polypeptide:

[0292] a) a first polypeptide comprising, in order from N-terminus to C-terminus: i) a KRAS peptide; and ii) a first MHC polypeptide; and b) a second polypeptide comprising, in order from N-terminus to C-terminus: i) at least one immunomodulatory polypeptide; ii) a second MHC polypeptide; and iii) an Ig Fc polypeptide (this arrangement being referred to as MOD Position 1);

[0293] a) a first polypeptide comprising, in order from N-terminus to C-terminus: i) a KRAS peptide; and ii) a first MHC polypeptide; and b) a second polypeptide comprising, in order from N-terminus to C-terminus: i) a second MHC polypeptide; ii) at least one immunomodulatory polypeptide; and iii) an Ig Fc polypeptide (this arrangement being referred to as MOD Position 2); TMP a) a first polypeptide comprising, in order from N-terminus to C-terminus: i) a KRAS peptide; and ii) a first MHC polypeptide; and b) a second polypeptide comprising, in order from N-terminus to C-terminus: i) a second MHC polypeptide; ii) an Ig Fc polypeptide; and iii) at least one immunomodulatory polypeptide (this arrangement being referred to as MOD Position 3).

[0294] a) a first polypeptide comprising, in order from N-terminus to C-terminus: i) at least one immunomodulatory polypeptide; ii) a KRAS peptide; and iii) a first MHC polypeptide; and b) a second polypeptide comprising, in order from N-terminus to C-terminus: i) a second MHC polypeptide; and ii) an Ig Fc polypeptide (this arrangement being referred to as MOD Position 4);

[0295] a) a first polypeptide comprising, in order from N-terminus to C-terminus: i) a KRAS peptide; ii) a first MHC polypeptide; and iii) at least one immunomodulatory polypeptide; and b) a second polypeptide comprising, in order from N-terminus to C-terminus: i) a second MHC polypeptide; and ii) an Ig Fc polypeptide (this arrangement being referred to as MOD Position 5);

[0296] In the above scaffolds, any of the components of the first and second polypeptides optionally may be joined to the next component in the polypeptide by a linker. In some cases, a peptide linker is between one or more of: i) the second MHC polypeptide and the Ig Fc polypeptide; ii) the epitope and the first MHC polypeptide; iii) the first MHC polypeptide and the immunomodulatory polypeptide; and (where the TMP comprises two immunomodulatory polypeptides on the first polypeptide chain) iv) between the two immunomodulatory polypeptides, v) the second MHC polypeptide and the Ig Fc polypeptide; vi) the first MHC polypeptide and the immunomodulatory polypeptide(s). In some cases, the peptide linker comprises the amino acid sequence AAAGG (SEQ ID NO:387). In some cases, the peptide linker comprises the amino acid sequence (GGGGS)n, where n is an integer from 1 to 10 (e.g., where n is 2, 3, or 4).

[0297] In any of the above scaffolds, the KRAS peptide has an amino acid sequence selected from the following group: VVGADGVGK (SEQ ID NO:176); VVGACGVGK (SEQ ID NO:177); VVGAVGVGK (SEQ ID NO:178); VVVGADGVGK (SEQ ID NO:179); VVVGAVGVGK (SEQ ID NO:180); VVVGACGVGK (SEQ ID NO:181); VTGADGVGK (SEQ ID NO:182); VTGAVGVGK (SEQ ID NO:183); VTGACGVGK (SEQ ID NO:184); VTVGADGVGK (SEQ ID NO:185); VTVGAVGVGK (SEQ ID NO:186); VTVGACGVGK (SEQ ID NO:187); LVVVGADGV (SEQ ID NO:192); LVVVGAVGV (SEQ ID NO:193); LVVVGACGV (SEQ ID NO:194); KLVVVGADGV (SEQ ID NO:195); KLVVVGAVGV (SEQ ID NO:196); KLVVVGACGV (SEQ ID NO:197); LLVVGADGV (SEQ ID NO:198); LLVVGAVGV (SEQ ID NO:199); LLVVGACGV (SEQ ID NO:200); FLVVVGADGV (SEQ ID NO:201); FLVVVGAVGV (SEQ ID NO:202); FLVVVGACGV (SEQ ID NO:203).

[0298] In the above scaffolds, in some cases, the second MHC polypeptide is an HLA heavy chain that comprises an amino acid sequence having at least 95% amino acid sequence identity to an HLA-A*0201 polypeptide, an HLA-A*1101 polypeptide or an HLA-A24 polypeptide. In some cases, the HLA heavy chain polypeptide is an HLA-A*0201 polypeptide. In some cases, the HLA heavy chain polypeptide is an HLA-A*0201 polypeptide comprising an A236C substitution. In some cases, the HLA heavy chain polypeptide is an HLA-A*1101 polypeptide comprising an A236C substitution.

[0299] In some cases, the scaffolds comprise two immunomodulatory polypeptides, where the two immunomodulatory polypeptides have the same amino acid sequence, e.g., the immunomodulatory polypeptide is a variant IL-2 polypeptide comprising H16A and F42A substitutions, or a variant IL-2 polypeptide comprising H16T and F42A substitutions.

[0300] In some cases, the Ig Fc polypeptide is a variant of a human IgG1 Fc polypeptide that substantially does not induce cell lysis, e.g., an IgG1 Fc polypeptide comprising L234A and L235A substitutions such as is shown in FIG. 3G.

[0301] In some cases, the first and the second polypeptides are disulfide linked to one another.

[0302] In some cases, a TMP of the present disclosure comprises a scaffold with a MOD Position 1 or Position 3 arrangement, wherein the HLA heavy chain polypeptide is a wild-type or variant HLA-A*0201 polypeptide, e.g., an HLA-A*0201 polypeptide comprising an A236C substitution, or a sequence as shown in FIG. 22C, or a variant thereof. In some cases, the Ig Fc polypeptide is a human IgG1 Fc polypeptide that substantially does not cause cell lysis, e.g., a human IgG1 Fc polypeptide comprising L234A and L235A substitutions as shown in FIG. 3G. In some cases, the first and the second polypeptides are disulfide linked to one another. In some cases, the immunomodulatory polypeptide is a variant IL-2 polypeptide comprising H16A and F42A substitutions or H16T and F42A substitutions. In some cases, the KRAS peptide has an amino acid sequence selected from the following group:

(SEQ ID NO: 176)
VVGADGVGK;
(SEQ ID NO: 177)
VVGACGVGK;
(SEQ ID NO: 178)
VVGAVGVGK;
(SEQ ID NO: 179)
VVVGADGVGK;
(SEQ ID NO: 180)
VVVGAVGVGK;
(SEQ ID NO: 181)
VVVGACGVGK;
(SEQ ID NO: 182)
VTGADGVGK;
(SEQ ID NO: 183)
VTGAVGVGK;
(SEQ ID NO: 184)
VTGACGVGK;
(SEQ ID NO: 185)
VTVGADGVGK;
(SEQ ID NO: 186)
VTVGAVGVGK;
(SEQ ID NO: 187)
VTVGACGVGK;
(SEQ ID NO: 192)
LVVVGADGV;
(SEQ ID NO: 193)
LVVVGAVGV;
(SEQ ID NO: 194)
LVVVGACGV;
(SEQ ID NO: 195)
KLVVVGADGV;
(SEQ ID NO: 196)
KLVVVGAVGV;
(SEQ ID NO: 197)
KLVVVGACGV;
(SEQ ID NO: 198)
LLVVGADGV;
(SEQ ID NO: 199)
LLVVGAVGV;
(SEQ ID NO: 200)
LLVVGACGV;
(SEQ ID NO: 201)
FLVVVGADGV;
(SEQ ID NO: 202)
FLVVVGAVGV;
(SEQ ID NO: 203)
FLVVVGACGV.

[0303] In some cases, a TMP of the present disclosure comprises a scaffold with a MOD Position 1 or Position 3 arrangement, wherein the HLA heavy chain polypeptide is a wild-type or variant HLA-A24 polypeptide (also referred to as HLA-A*2402), e.g., an HLA-A*0201 polypeptide comprising an A236C substitution or an amino acid sequence shown in any one of FIG. 21O, 21P, 21Q, 21R, 21S or 21T, or a variant thereof. In some cases, the Ig Fc polypeptide is a human IgG1 Fc polypeptide that substantially does not cause cell lysis, e.g., a human IgG1 Fc polypeptide comprising L234A and L235A substitutions as shown in FIG. 3G. In some cases, the first and the second polypeptides are disulfide linked to one another. In some cases, the immunomodulatory polypeptide is a variant IL-2 polypeptide comprising H16A and F42A substitutions or H16T and F42A substitutions. In some cases, the KRAS peptide has an amino acid sequence selected from the following group: VVGADGVGK (SEQ ID NO:176); VVGACGVGK (SEQ ID NO:177); VVGAVGVGK (SEQ ID NO:178); VVVGADGVGK (SEQ ID NO:179); VVVGAVGVGK (SEQ ID NO:180); VVVGACGVGK (SEQ ID NO:181); VTGADGVGK (SEQ ID NO:182); VTGAVGVGK (SEQ ID NO:183); VTGACGVGK (SEQ ID NO:184); VTVGADGVGK (SEQ ID NO:185); VTVGAVGVGK (SEQ ID NO:186); VTVGACGVGK (SEQ ID NO:187); LVVVGADGV (SEQ ID NO:192); LVVVGAVGV (SEQ ID NO:193); LVVVGACGV (SEQ ID NO:194); KLVVVGADGV (SEQ ID NO:195); KLVVVGAVGV (SEQ ID NO:196); KLVVVGACGV (SEQ ID NO:197); LLVVGADGV (SEQ ID NO:198); LLVVGAVGV (SEQ ID NO:199); LLVVGACGV (SEQ ID NO:200); FLVVVGADGV (SEQ ID NO:201); FLVVVGAVGV (SEQ ID NO:202); FLVVVGACGV (SEQ ID NO:203).

[0304] In some cases, a TMP of the present disclosure comprises a scaffold with a MOD Position 1 or Position 3 arrangement, wherein the HLA heavy chain polypeptide is a wild-type or variant HLA-A*1101 polypeptide as disclosed herein, e.g. an HLA-A*1101 polypeptide comprising an A236C substitution or having an amino acid sequence as shown in one of FIG. 21J or 21K, or a variant thereof. In some cases, the Ig Fc polypeptide is a human IgG1 Fc polypeptide that substantially does not cause cell lysis, e.g., a human IgG1 Fc polypeptide comprising L234A and L235A substitutions as shown in FIG. 3G. In some cases, the first and the second polypeptides are disulfide linked to one another. In some cases, the immunomodulatory polypeptide is a variant IL-2 polypeptide comprising H16A and F42A substitutions or H16T and F42A substitutions. In some cases, the KRAS peptide has an amino acid sequence selected from the following group: VVGADGVGK (SEQ ID NO:176); VVGACGVGK (SEQ ID NO:177); VVGAVGVGK (SEQ ID NO:178); VVVGADGVGK (SEQ ID NO:179); VVVGAVGVGK (SEQ ID NO:180); VVVGACGVGK (SEQ ID NO:181); VTGADGVGK (SEQ ID NO:182); VTGAVGVGK (SEQ ID NO:183); VTGACGVGK (SEQ ID NO:184); VTVGADGVGK (SEQ ID NO:185); VTVGAVGVGK (SEQ ID NO:186); VTVGACGVGK (SEQ ID NO:187); LVVVGADGV (SEQ ID NO:192); LVVVGAVGV (SEQ ID NO:193); LVVVGACGV (SEQ ID NO:194); KLVVVGADGV (SEQ ID NO:195); KLVVVGAVGV (SEQ ID NO:196); KLVVVGACGV (SEQ ID NO:197); LLVVGADGV (SEQ ID NO:198); LLVVGAVGV (SEQ ID NO:199); LLVVGACGV (SEQ ID NO:200); FLVVVGADGV (SEQ ID NO:201); FLVVVGAVGV (SEQ ID NO:202); FLVVVGACGV (SEQ ID NO:203).

[0305] In some cases, a TMP of the present disclosure comprises a scaffold with a MOD Position 1 or Position 3 arrangement, wherein the HLA heavy chain polypeptide is a wild-type or variant HLA-A*1101 polypeptide as disclosed herein, e.g. an HLA-A*1101 polypeptide comprising an A236C substitution or having an amino acid sequence as shown in one of FIG. 21J or 21K, or a variant thereof. In some cases, the Ig Fc polypeptide is a human IgG1 Fc polypeptide that substantially does not cause cell lysis, e.g., a human IgG1 Fc polypeptide comprising L234A and L235A substitutions as shown in FIG. 3G. In some cases, the first and the second polypeptides are disulfide linked to one another. In some cases, the immunomodulatory polypeptide is a variant IL-2 polypeptide comprising H16A and F42A substitutions or H16T and F42A substitutions. In some cases, the KRAS peptide has an amino acid sequence selected from the following group: VVGADGVGK (SEQ ID NO:176); VVGACGVGK (SEQ ID NO:177); VVGAVGVGK (SEQ ID NO:178); VVVGADGVGK (SEQ ID NO:179); VVVGAVGVGK (SEQ ID NO:180); VVVGACGVGK (SEQ ID NO:181); VTGADGVGK (SEQ ID NO:182); VTGAVGVGK (SEQ ID NO:183); VTGACGVGK (SEQ ID NO:184); VTVGADGVGK (SEQ ID NO:185); VTVGAVGVGK (SEQ ID NO:186); VTVGACGVGK (SEQ ID NO:187); LVVVGADGV (SEQ ID NO:192); LVVVGAVGV (SEQ ID NO:193); LVVVGACGV (SEQ ID NO:194); KLVVVGADGV (SEQ ID NO:195); KLVVVGAVGV (SEQ ID NO:196); KLVVVGACGV (SEQ ID NO:197); LLVVGADGV (SEQ ID NO:198); LLVVGAVGV (SEQ ID NO:199); LLVVGACGV (SEQ ID NO:200); FLVVVGADGV (SEQ ID NO:201); FLVVVGAVGV (SEQ ID NO:202); FLVVVGACGV (SEQ ID NO:203). In the MOD Position 1 arrangement, in some cases, one or more independently selected peptide linkers is/are located between one or more of: i) the KRAS peptide and the first MHC polypeptide; ii) the immunomodulatory polypeptide and the second MHC polypeptide (and where the TMP comprises two immunomodulatory polypeptides on the second polypeptide chain, between the two immunomodulatory polypeptides); and/or iii) the second MHC polypeptide and the Ig Fc polypeptide. In the MOD Position 3 arrangement, in some cases, one or more independently selected peptide linkers is/are located between one or more of: i) the KRAS peptide and the first MHC polypeptide; ii) the second MHC polypeptide and the Ig Fc polypeptide and iii) the Ig Fc and the immunomodulatory polypeptide (and where the TMP comprises two immunomodulatory polypeptides on the second polypeptide chain, between the two immunomodulatory polypeptides)_{T}MP. In some cases, the peptide linker comprises the amino acid sequence AAAGG (SEQ ID NO:387). In some cases, the peptide linker comprises the amino acid sequence (GGGGS)n (SEQ ID NO:377), where n is an integer from 1 to 10 (e.g., where n is 2, 3, or 4).

[0306] Furthermore, as discussed above and as depicted schematically in FIG. 16A-16C, the first polypeptide chain and the second polypeptide chain of a TMP of the present disclosure can be linked by one or more disulfide bonds. For example, a TMMP of the present disclosure can comprise: a) a first polypeptide chain comprising an β2M polypeptide having an R12C substitution; and b) a second polypeptide chain comprising a class I MHC heavy chain polypeptide having an A236C substitution; such that a disulfide bond forms between the Cys at position 12 of the β2M polypeptide in the first polypeptide chain and the Cys at position 236 of the class I MHC heavy chain polypeptide in the second polypeptide chain. As another example, a TMMP of the present disclosure can comprise: a) a first polypeptide comprising, in order from N-terminus to C-terminus: i) a peptide epitope; ii) a peptide linker comprising a GCGGS(GGGGS). (SEQ ID NO:582) sequence, where n is 1, 2, or 3; and iii) a β2M polypeptide; and b) a second polypeptide comprising a class I MHC heavy chain polypeptide having a Y84C substitution, such that a disulfide bond forms between the Cys in the peptide linker in the first polypeptide chain and the Cys at position 84 of the class I MHC heavy chain polypeptide in the second polypeptide chain. In other examples, a TMP of the present disclosure can comprise: a) a first polypeptide comprising, in order from N-terminus to C-terminus: i) a peptide epitope; ii) a peptide linker comprising a GCGGS(GGGGS). (SEQ ID NO:582) sequence, where n is 1, 2, or 3; and iii) a β2M polypeptide having an R12C substitution; and b) a second polypeptide comprising a class I MHC heavy chain polypeptide having a Y84C substitution and an A236C substitution; such that: i) a first disulfide bond forms between the Cys in the peptide linker in the first polypeptide chain and the Cys at position 84 of the class I MHC heavy chain polypeptide in the second polypeptide chain; and ii) a second disulfide bond forms between the Cys at position 12 of the β2M polypeptide in the first polypeptide chain and the Cys at position 236 of the class I MHC heavy chain polypeptide in the second polypeptide chain. For simplicity, the first disulfide bond is referred to as “G2C/Y84C”; and the second disulfide bond is referred to as “R12C/A236C.” A TMP of the present disclosure can include: a) a G2C/Y84C disulfide bond and not an R12C/A236C disulfide bond; b) an R12C/A236C disulfide bond and not a G2C/Y84C disulfide bond; or c) a G2C/Y84C disulfide bond and an R12C/A236C disulfide bond.

[0307] A TMP of the present disclosure can include: a) a G2C/Y84C disulfide bond and not an R12C/A236C disulfide bond; and b) at least one immunomodulatory polypeptide at position 1 or 3. A TMP of the present disclosure can include: a) a G2C/Y84C disulfide bond and not an R12C/A236C disulfide bond; and b) at least one immunomodulatory polypeptide at position 2, 4 or 5.

[0308] A TMP of the present disclosure can include: a) an R12C/A236C disulfide bond and not a G2C/Y84C disulfide bond; and at least one immunomodulatory polypeptide at position 1 or 3. A TMP of the present disclosure can include: a) an R12C/A236C disulfide bond and not a G2C/Y84C disulfide bond; and at least one immunomodulatory polypeptide at position 2, 4 or 5.

[0309] A TMP of the present disclosure can include: a) a G2C/Y84C disulfide bond and an R12C/A236C disulfide bond; and b) and at least one immunomodulatory polypeptide at position 1 or 3. A TMP of the present disclosure can include: a) a G2C/Y84C disulfide bond and an R12C/A236C disulfide bond; and b) and at least one immunomodulatory polypeptide at position 2, 4 or 5.

[0310] In some cases, a TMP of the present disclosure comprises a second polypeptide comprising (i) an HLA-A0201 (Y84A; A236C) polypeptide comprising an Ala at position 84 and a Cys at position 236, or (ii) an HLA-A0201 (Y84C; A139C) polypeptide comprising a Cys at positions 84 and 139, or (iii) an HLA-A0201 (Y84C; A236) polypeptide comprising a Cys at positions 84 and an alanine at position 236, e.g., as depicted in FIG. 13A, 13B or 13C, respectively.

[0311] In some cases, a single-chain TMP of the present disclosure comprises a MHC class I heavy chain polypeptide comprising (i) an HLA-A*1101 (Y84A; A236C) polypeptide comprising an Ala at position 84 and a Cys at position 236, or (ii) an HLA-A*1101 (Y84C; A236C) polypeptide comprising a Cys at positions 84 and 236, or (iii) an HLA-A*1101 (Y84C; A236) polypeptide comprising a Cys at position 84 and an alanine at position 236, e.g., as depicted in FIG. 13D, FIG. 13E, or FIG. 13F, respectively.

[0312] In some cases, a TMP of the present disclosure comprises a second polypeptide comprising (i) an HLA-A24 (Y84A; A236C) polypeptide comprising an Ala at position 84 and a Cys at position 236, or (ii) an HLA-A24 (Y84C; A236C) polypeptide comprising a Cys at positions 84 and 236, or (iii) an HLA-A24 (Y84C; A236) polypeptide comprising a Cys at position 84 and an alanine at position 236, e.g., as depicted in FIG. 13G, FIG. 13H or FIG. 13I.

[0313] As non-limiting examples, a TMP of the present disclosure can comprise one of the combinations of first and second polypeptides set out in Table 2, below:

TABLE 2

| First Polypeptide | Second Polypeptide |
|---|---|
| FIG. 14A | FIG. 13D, 13E or 13F |
| FIG. 14B | FIG. 13D, 13E or 13F |
| FIG. 14C | FIG. 13D, 13E or 13F |
| FIG. 14D | FIG. 13D, 13E or 13F |
| FIG. 14E | FIG. 13D, 13E or 13F |
| FIG. 14F | FIG. 13D, 13E or 13F |
| FIG. 14G | FIG. 13D, 13E or 13F |
| FIG. 14H | FIG. 13D, 13E or 13F |
| FIG. 14I | FIG. 13D, 13E or 13F |
| FIG. 14J | FIG. 13D, 13E or 13F |
| FIG. 14K | FIG. 13D, 13E, 13F, or 19P |
| FIG. 14L | FIG. 13D, 13E or 13F |
| FIG. 14M | FIG. 13D, 13E or 13F |
| FIG. 14N | FIG. 13D, 13E or 13F |
| FIG. 14O | FIG. 13D, 13E or 13F |
| FIG. 14P | FIG. 13D, 13E or 13F |
| FIG. 14Q | FIG. 13D, 13E, 13F, or 19P |
| FIG. 14R | FIG. 13D, 13E or 13F |
| FIG. 14S | FIG. 13D, 13E or 13F |
| FIG. 14T | FIG. 13D, 13E or 13F |
| FIG. 14U | FIG. 13D, 13E or 13F |
| FIG. 14V | FIG. 13D, 13E or 13F |
| FIG. 14W | FIG. 13D, 13E or 13F |
| FIG. 14X | FIG. 13D, 13E or 13F |
| FIG. 14Y | FIG. 13D, 13E or 13F |
| FIG. 14Z | FIG. 13D, 13E or 13F |
| FIG. 14AA | FIG. 13D, 13E or 13F |
| FIG. 14BB | FIG. 13D, 13E or 13F |
| FIG. 14CC | FIG. 13D, 13E or 13F |
| FIG. 14DD | FIG. 13D, 13E or 13F |
| FIG. 14EE | FIG. 13D, 13E or 13F |
| FIG. 14FF | FIG. 13D, 13E or 13F |
| FIG. 14GG | FIG. 13D, 13E or 13F |
| FIG. 14HH | FIG. 13D, 13E or 13F |
| FIG. 14II | FIG. 13D, 13E or 13F |
| FIG. 14JJ | FIG. 13D, 13E or 13F |

[0314] As non-limiting examples, a TMP of the present disclosure can comprise one of the combinations of first and second polypeptides set out in Table 3, below:

TABLE 3

| First Polypeptide | Second Polypeptide |
|---|---|
| FIG. 15A | FIG. 13A, 13B or 13C |
| FIG. 15B | FIG. 13A, 13B or 13C |
| FIG. 15C | FIG. 13A, 13B or 13C |
| FIG. 15D | FIG. 13A, 13B or 13C |
| FIG. 15E | FIG. 13A, 13B or 13C |
| FIG. 15F | FIG. 13A, 13B or 13C |
| FIG. 15G | FIG. 13A, 13B or 13C |
| FIG. 15H | FIG. 13A, 13B or 13C |
| FIG. 15I | FIG. 13A, 13B or 13C |
| FIG. 15J | FIG. 13A, 13B or 13C |
| FIG. 15K | FIG. 13A, 13B or 13C |
| FIG. 15L | FIG. 13A, 13B or 13C |
| FIG. 15M | FIG. 13A, 13B or 13C |
| FIG. 15N | FIG. 13A, 13B or 13C |
| FIG. 15O | FIG. 13A, 13B or 13C |
| FIG. 15P | FIG. 13A, 13B or 13C |
| FIG. 15Q | FIG. 13A, 13B or 13C |
| FIG. 15R | FIG. 13A, 13B or 13C |
| FIG. 15S | FIG. 13A, 13B or 13C |
| FIG. 15T | FIG. 13A, 13B or 13C |
| FIG. 15U | FIG. 13A, 13B or 13C |
| FIG. 15V | FIG. 13A, 13B or 13C |
| FIG. 15W | FIG. 13A, 13B or 13C |
| FIG. 15X | FIG. 13A, 13B or 13C |
| FIG. 15Y | FIG. 13A, 13B or 13C |
| FIG. 15Z | FIG. 13A, 13B or 13C |
| FIG. 15AA | FIG. 13A, 13B or 13C |
| FIG. 15BB | FIG. 13A, 13B or 13C |
| FIG. 15CC | FIG. 13A, 13B or 13C |
| FIG. 15DD | FIG. 13A, 13B or 13C |
| FIG. 15EE | FIG. 13A, 13B or 13C |
| FIG. 15FF | FIG. 13A, 13B or 13C |
| FIG. 15GG | FIG. 13A, 13B or 13C |
| FIG. 15HH | FIG. 13A, 13B or 13C |
| FIG. 15II | FIG. 13A, 13B or 13C |
| FIG. 15JJ | FIG. 13A, 13B or 13C |

[0315] In some cases, a heterodimeric TMP of the present disclosure comprises a class I MHC heavy chain that comprises an intrachain disulfide bond. For example, in some cases, a heterodimeric TMP of the present disclosure comprises a class I MHC heavy chain that comprises an intrachain disulfide bond formed between Cys residues resulting from Y84C and A139C substitutions. In some cases, such a heterodimeric TMP also comprises a class I MHC heavy chain that comprises an A236C substitution, where the Cys-236 can form a disulfide bond with a second polypeptide chain that comprises: i) a peptide epitope; ii) a β2M polypeptide comprising an R12C substitution, such that the Cys-12 forms a disulfide bond with the Cys-236 in the class I MHC heavy chain; and iii) a peptide linker between the peptide epitope and the β2M polypeptide, where the linker comprises the amino acid sequence (GGGGS)n, where n is an integer from 1 to 9 (e.g., n is 1, 2, or 3).

[0316] As examples, a TMP of the present disclosure can comprise one of the combinations of first and second polypeptides, set out in Table 4, below, to provide heterodimeric TMPs comprising a class I MHC A02 heavy allele with Y84C, A139C, and A236C substitutions; and where the immunomodulatory polypeptides are at position 1 or position 3 as depicted in FIG. 17.

TABLE 4

| | Second | Second |
|---|---|---|
| | Polypeptide | Polypeptide |
| | (MOD | (MOD |
| First Polypeptide | Position 1) | Position 3) |
| FIG. 14A or 15A | FIG. 13K | FIG. 13J |
| FIG. 14D or 15D | FIG. 13K | FIG. 13J |
| FIG. 14G or 15G | FIG. 13K | FIG. 13J |
| FIG. 14J or 15J | FIG. 13K | FIG. 13J |
| FIG. 14M or 15M | FIG. 13K | FIG. 13J |
| FIG. 14P or 15P | FIG. 13K | FIG. 13J |
| FIG. 14S or 15S | FIG. 13K | FIG. 13J |
| FIG. 14V or 15V | FIG. 13K | FIG. 13J |
| FIG. 14Y or 15Y | FIG. 13K | FIG. 13J |
| FIG. 14BB or 15BB | FIG. 13K | FIG. 13J |
| FIG. 14EE or 15EE | FIG. 13K | FIG. 13J |
| FIG. 14HH or 15HH | FIG. 13K | FIG. 13J |

[0317] As another example, a heterodimeric TMP of the present disclosure can comprise: a) a first polypeptide comprising the amino acid sequence depicted in FIG. 13L; and a second polypeptide comprises the amino acid sequence depicted in FIG. 14K. As another example, a heterodimeric TMP of the present disclosure can comprise: a) a first polypeptide comprising the amino acid sequence depicted in FIG. 13L; and a second polypeptide comprises the amino acid sequence depicted in FIG. 14Q.

[0318] As noted above, in some cases, a TMP of the present disclosure is a heterodimeric TMP comprising a first polypeptide and a second polypeptide, where the first polypeptide and the second polypeptide are linked by one or more disulfide bonds, e.g., a single disulfide bond or two disulfide bonds. For example, as discussed above, a TMP of the present disclosure can include: a) a G2C/Y84C disulfide bond and not an R12C/A236C disulfide bond; b) an R12C/A236C disulfide bond and not a G2C/Y84C disulfide bond; or c) a G2C/Y84C disulfide bond and an R12C/A236C disulfide bond. In some cases, e.g., where a TMP of the present disclosure includes a G2C/Y84C disulfide bond and not an R12C/A236C disulfide bond, the β2M polypeptide does not include an R12C substitution (and instead has an Arg at position 12) and the class I MHC heavy chain polypeptide does not include an A236C substitution (and instead has an Ala at position 236); in other words, the β2M polypeptide and the class I MHC heavy chain polypeptide do not include “free” (unpaired) Cys residues at position 12 of the β2M and at position 236 of the class I MHC heavy chain polypeptide. Similarly, in some cases, e.g., where a TMP of the present disclosure includes an R12C/A236C disulfide bond and not a G2C/Y84C disulfide bond, the linker between the peptide epitope and the β2M polypeptide does not include a Cys substitution (and instead, the linker is a (GGGGS)n linker, where n is an integer from 1 to 5) and the class I MHC polypeptide does not include a Y84C substitution (and instead has a Tyr at position 84); in other words, neither the linker between the peptide epitope and the β2M polypeptide nor the class I MHC polypeptide includes a “free” (unpaired) Cys residue in the linker or at position 84 of the class I MHC polypeptide.

[0319] Single-Chain TMPs

[0320] As noted above and as depicted schematically in FIG. 18, an immunomodulatory polypeptide (i.e., one or more immunomodulatory polypeptides) can be present in a single-chain TMP of the present disclosure at any of a variety of positions. FIG. 18 depicts the position of two copies of a variant IL-2 polypeptide; however, the immunomodulatory polypeptide can be any number of and any of a variety of immunomodulatory polypeptides, as described herein. As depicted in FIG. 18, an immunomodulatory polypeptide can be: 1) C-terminal to the MHC class I heavy chain and N-terminal to the Ig Fc polypeptide; 2) C-terminal to the Ig Fc polypeptide; or 3) N-terminal to the peptide epitope.

[0321] The MHC class I polypeptides (i.e., the β2M and heavy chain polypeptides), immunomodulatory polypeptides, Ig Fc components and linkers of a single-chain TMP according to this disclosure are identical to those described above for the heterodimeric TMPs. Further, the single-chain TMPs can include the same disulfide bonds as in the heterodimeric TMPs, namely, intrachain in the MHC class I heavy chain polypeptide, e.g., between two Cys residues as discussed above (e.g., between the Cys-84 and the Cys-139 of the heavy chain), interchain between the β2M and heavy chain polypeptides (e.g., between R12C of the β2M and a Cys at residue 236 of the heavy chain), and/or a disulfide that joins a Cys in the MHC class I heavy chain to a Cys residue in the linker between the epitope and β2M polypeptide. In some cases, the MHC class I heavy chain is an A02 allele MHC class I heavy chain. In some cases, the MHC class I heavy chain comprises a Y84C and an A139C substitution, such that an intrachain disulfide bond forms between the Cys-84 and the Cys-139. In some cases, the MHC class I heavy chain is an A02 allele MHC class I heavy chain.

[0322] In some cases, a single-chain TMP of the present disclosure comprises a scaffold with a MOD Position 2 or Position 3 arrangement as shown in FIG. 18, wherein the HLA heavy chain polypeptide is a wild-type or variant HLA-A*0201 polypeptide, e.g., an HLA-A*0201 polypeptide comprising an A236C substitution, or a sequence as shown in FIG. 22C, or a variant thereof. In some cases, the Ig Fc polypeptide is a human IgG1 Fc polypeptide that substantially does not cause cell lysis, e.g., a human IgG1 Fc polypeptide comprising L234A and L235A substitutions as shown in FIG. 3G. In some cases, the single-chain TMP comprises an intrachain disulfide bond (i) between two Cys residues in the MHC class I heavy chain polypeptide, (ii) between the β2M and heavy chain polypeptides, and/or between a Cys in the MHC class I heavy chain and a Cys in the linker between the KRAS epitope and β2M polypeptide. In some cases, the immunomodulatory polypeptide is a variant IL-2 polypeptide comprising H16A and F42A substitutions or H16T and F42A substitutions. In some cases, the KRAS peptide has an amino acid sequence selected from the following group: VVGADGVGK (SEQ ID NO:176); VVGACGVGK (SEQ ID NO:177); VVGAVGVGK (SEQ ID NO:178); VVVGADGVGK (SEQ ID NO:179); VVVGAVGVGK (SEQ ID NO:180); VVVGACGVGK (SEQ ID NO:181); VTGADGVGK (SEQ ID NO:182); VTGAVGVGK (SEQ ID NO:183); VTGACGVGK (SEQ ID NO:184); VTVGADGVGK (SEQ ID NO:185); VTVGAVGVGK (SEQ ID NO:186); VTVGACGVGK (SEQ ID NO:187); LVVVGADGV (SEQ ID NO:192); LVVVGAVGV (SEQ ID NO:193); LVVVGACGV (SEQ ID NO:194); KLVVVGADGV (SEQ ID NO:195); KLVVVGAVGV (SEQ ID NO:196); KLVVVGACGV (SEQ ID NO:197); LLVVGADGV (SEQ ID NO:198); LLVVGAVGV (SEQ ID NO:199); LLVVGACGV (SEQ ID NO:200); FLVVVGADGV (SEQ ID NO:201); FLVVVGAVGV (SEQ ID NO:202); FLVVVGACGV (SEQ ID NO:203).

[0323] In some cases, a single-chain TMP of the present disclosure comprises a scaffold with a MOD Position 2 or Position 3 arrangement as shown in FIG. 18, wherein the HLA heavy chain polypeptide is a wild-type or variant HLA-A24 polypeptide (also referred to as HLA-A*2402), e.g., an HLA-A*0201 polypeptide comprising an A236C substitution or an amino acid sequence shown in any one of FIG. 21O, 21P, 21Q, 21R, 21S or 21T, or a variant thereof. In some cases, the Ig Fc polypeptide is a human IgG1 Fc polypeptide that substantially does not cause cell lysis, e.g., a human IgG1 Fc polypeptide comprising L234A and L235A substitutions as shown in FIG. 3G. In some cases, the single-chain TMP comprises an intrachain disulfide bond (i) between two Cys residues in the MHC class I heavy chain polypeptide, (ii) between the β2M and heavy chain polypeptides, and/or between a Cys in the MHC class I heavy chain and a Cys in the linker between the KRAS epitope and β2M polypeptide. In some cases, the immunomodulatory polypeptide is a variant IL-2 polypeptide comprising H16A and F42A substitutions or H16T and F42A substitutions. In some cases, the KRAS peptide has an amino acid sequence selected from the following group: VVGADGVGK (SEQ ID NO:176); VVGACGVGK (SEQ ID NO:177); VVGAVGVGK (SEQ ID NO:178); VVVGADGVGK (SEQ ID NO:179); VVVGAVGVGK (SEQ ID NO:180); VVVGACGVGK (SEQ ID NO:181); VTGADGVGK (SEQ ID NO:182); VTGAVGVGK (SEQ ID NO:183); VTGACGVGK (SEQ ID NO:184); VTVGADGVGK (SEQ ID NO:185); VTVGAVGVGK (SEQ ID NO:186); VTVGACGVGK (SEQ ID NO:187); LVVVGADGV (SEQ ID NO:192); LVVVGAVGV (SEQ ID NO:193); LVVVGACGV (SEQ ID NO:194); KLVVVGADGV (SEQ ID NO:195); KLVVVGAVGV (SEQ ID NO:196); KLVVVGACGV (SEQ ID NO:197); LLVVGADGV (SEQ ID NO:198); LLVVGAVGV (SEQ ID NO:199); LLVVGACGV (SEQ ID NO:200); FLVVVGADGV (SEQ ID NO:201); FLVVVGAVGV (SEQ ID NO:202); FLVVVGACGV (SEQ ID NO:203).

[0324] In some cases, a TMP of the present disclosure comprises a scaffold with a MOD Position 2 or Position 3 arrangement as shown in FIG. 18, wherein the HLA heavy chain polypeptide is a wild-type or variant HLA-A*1101 polypeptide as disclosed herein, e.g. an HLA-A*1101 polypeptide comprising an A236C substitution or having an amino acid sequence as shown in one of FIG. 21J or 21K, or a variant thereof. In some cases, the Ig Fc polypeptide is a human IgG1 Fc polypeptide that substantially does not cause cell lysis, e.g., a human IgG1 Fc polypeptide comprising L234A and L235A substitutions as shown in FIG. 3G. In some cases, the single-chain TMP comprises an intrachain disulfide bond (i) between two Cys residues in the MHC class I heavy chain polypeptide, (ii) between the β2M and heavy chain polypeptides, and/or between a Cys in the MHC class I heavy chain and a Cys in the linker between the KRAS epitope and β2M polypeptide. In some cases, the immunomodulatory polypeptide is a variant IL-2 polypeptide comprising H16A and F42A substitutions or H16T and F42A substitutions. In some cases, the KRAS peptide has an amino acid sequence selected from the following group: VVGADGVGK (SEQ ID NO:176); VVGACGVGK (SEQ ID NO:177); VVGAVGVGK (SEQ ID NO:178); VVVGADGVGK (SEQ ID NO:179); VVVGAVGVGK (SEQ ID NO:180); VVVGACGVGK (SEQ ID NO:181); VTGADGVGK (SEQ ID NO:182); VTGAVGVGK (SEQ ID NO:183); VTGACGVGK (SEQ ID NO:184); VTVGADGVGK (SEQ ID NO:185); VTVGAVGVGK (SEQ ID NO:186); VTVGACGVGK (SEQ ID NO:187); LVVVGADGV (SEQ ID NO:192); LVVVGAVGV (SEQ ID NO:193); LVVVGACGV (SEQ ID NO:194); KLVVVGADGV (SEQ ID NO:195); KLVVVGAVGV (SEQ ID NO:196); KLVVVGACGV (SEQ ID NO:197); LLVVGADGV (SEQ ID NO:198); LLVVGAVGV (SEQ ID NO:199); LLVVGACGV (SEQ ID NO:200); FLVVVGADGV (SEQ ID NO:201); FLVVVGAVGV (SEQ ID NO:202); FLVVVGACGV (SEQ ID NO:203).

[0325] As discussed above, the polypeptides of a single-chain TMP can be linked by one or more disulfide bonds. For example, a TMP of the present disclosure can comprise a β2M polypeptide having an R12C substitution and a class I MHC heavy chain polypeptide having an A236C substitution; such that a disulfide bond forms between the Cys at position 12 of the β2M polypeptide and the Cys at position 236 of the class I MHC heavy chain polypeptide. As another example, a single-chain TMP of the present disclosure can comprise i) a KRAS epitope and a β2M polypeptide that are joined by a peptide linker comprising a GCGGS(GGGGS). (SEQ ID NO:582) sequence, where n is 1, 2, or 3, and ii) a class I MHC heavy chain polypeptide having a Y84C substitution, such that a disulfide bond forms between the Cys in the peptide linker and the Cys at position 84 of the class I MHC heavy chain polypeptide. In other examples, a single-chain TMP of the present disclosure can comprise i) a KRAS epitope and a β2M polypeptide that are joined by a peptide linker comprising a GCGGS(GGGGS). (SEQ ID NO:582) sequence, where n is 1, 2, or 3, and where the β2M polypeptide comprises an R12C substitution; and ii) a class I MHC heavy chain polypeptide having a Y84C substitution and an A236C substitution, such that a) a first disulfide bond forms between the Cys in the peptide linker and the Cys at position 84 of the class I MHC heavy chain polypeptide, and b) a second disulfide bond forms between the Cys at position 12 of the β2M polypeptide and the Cys at position 236 of the class I MHC heavy chain polypeptide. For simplicity, the first disulfide bond is referred to as “G2C/Y84C”; and the second disulfide bond is referred to as “R12C/A236C.” A single-chain TMP of the present disclosure can include: a) a G2C/Y84C disulfide bond and not an R12C/A236C disulfide bond; b) an R12C/A236C disulfide bond and not a G2C/Y84C disulfide bond; or c) a G2C/Y84C disulfide bond and an R12C/A236C disulfide bond. In some cases, the MHC class I heavy chain comprises a non-naturally occurring Cys at position 84 and a non-naturally occurring residue at position 139, such that an intrachain disulfide bond forms between the Cys-84 and the Cys-139.

[0326] A single-chain TMP of the present disclosure can include: a) a G2C/Y84C disulfide bond and not an R12C/A236C disulfide bond; and b) at least one immunomodulatory polypeptide at position 2 or 3. A single-chain TMP of the present disclosure can include: a) an R12C/A236C disulfide bond and not a G2C/Y84C disulfide bond; and at least one immunomodulatory polypeptide at position 2 or 3. A single-chain TMP of the present disclosure can include: a) a G2C/Y84C disulfide bond and an R12C/A236C disulfide bond; and b) and at least one immunomodulatory polypeptide at position 2 or 3.

[0327] In some cases, a single-chain TMP of the present disclosure comprises a MHC class I heavy chain polypeptide comprising (i) an HLA-A0201 (Y84A; A236C) polypeptide comprising an Ala at position 84 and a Cys at position 236, or (ii) an HLA-A0201 (Y84C; A139C) polypeptide comprising a Cys at positions 84 and 139, or (iii) an HLA-A0201 (Y84C; A236) polypeptide comprising a Cys at position 84 and an alanine at position 236, e.g., as depicted in FIG. 13A, 13B or 13C, respectively.

[0328] In some cases, a single-chain TMP of the present disclosure comprises a MHC class I heavy chain polypeptide comprising (i) an HLA-A*1101 (Y84A; A236C) polypeptide comprising an Ala at position 84 and a Cys at position 236, or (ii) an HLA-A*1101 (Y84C; A236C) polypeptide comprising a Cys at positions 84 and 236, or (iii) an HLA-A*1101 (Y84C; A236) polypeptide comprising a Cys at position 84 and an alanine at position 236, e.g., as depicted in FIG. 13D, FIG. 13E, or FIG. 13F, respectively.

[0329] In some cases, a TMP of the present disclosure comprises a second polypeptide comprising (i) an HLA-A24 (Y84A; A236C) polypeptide comprising an Ala at position 84 and a Cys at position 236, or (ii) an HLA-A24 (Y84C; A236C) polypeptide comprising a Cys at positions 84 and 236, or (iii) an HLA-A24 (Y84C; A236) polypeptide comprising a Cys at position 84 and an alanine at position 236, e.g., as depicted in FIG. 13G, FIG. 13H or FIG. 13I, respectively.

[0330] As one non-limiting example, a single-chain TMP of the present disclosure can comprise the amino acid sequence depicted in FIG. 19A (TMP “4095”). As another non-limiting example, a single-chain TMP of the present disclosure can comprise the amino acid sequence depicted in FIG. 19B (TMP “4073”). As another non-limiting example, a single-chain TMP of the present disclosure can comprise the amino acid sequence depicted in FIG. 19C (TMP “4074”). As another non-limiting example, a single-chain TMP of the present disclosure can comprise the amino acid sequence depicted in FIG. 19D (TMP “4333”). As another non-limiting example, a single-chain TMP of the present disclosure can comprise the amino acid sequence depicted in FIG. 19E (TMP “4335”). As another non-limiting example, a single-chain TMP of the present disclosure can comprise the amino acid sequence depicted in FIG. 19F. As another non-limiting example, a single-chain TMP of the present disclosure can comprise the amino acid sequence depicted in FIG. 19G (TMP “4238”). As another non-limiting example, a single-chain TMP of the present disclosure can comprise the amino acid sequence depicted in FIG. 19H (TMP “4241”). As another non-limiting example, a single-chain TMP of the present disclosure can comprise the amino acid sequence depicted in FIG. 19I (TMP “4334”). As another non-limiting example, a single-chain TMP of the present disclosure can comprise the amino acid sequence depicted in FIG. 19J (TMP “4144”). As another non-limiting example, a single-chain TMP of the present disclosure can comprise the amino acid sequence depicted in FIG. 19K (TMP “4145”). As another non-limiting example, a single-chain TMP of the present disclosure can comprise the amino acid sequence depicted in FIG. 19L (TMP “4146”).

### Methods of Generating a Multimeric T-Cell Modulatory Polypeptide

[0331] Methods of obtaining a TMP comprising one or more variant immunomodulatory polypeptides that exhibit lower affinity for a cognate costimulatory polypeptide compared to the affinity of the corresponding parental wild-type immunomodulatory polypeptide for the costimulatory polypeptide are disclosed in published PCT application applications WO2020132138A1 and WO2019/051091, discussed above, the disclosures of which as they pertain to methods of generating TMPs are expressly incorporated herein by reference, including specifically paragraphs [00560]-[00583] of WO2020132138A1 and paragraphs [003641400387] of WO2019/051091.

### Nucleic Acids

[0332] The present disclosure provides a nucleic acid comprising a nucleotide sequence encoding a TMP of the present disclosure. The present disclosure provides a nucleic acid comprising a nucleotide sequence encoding a TMP of the present disclosure.

[0333] The present disclosure provides nucleic acids comprising nucleotide sequences encoding a TMP of the present disclosure. In some cases, the individual polypeptide chains of a heterodimeric TMP of the present disclosure are encoded in separate nucleic acids. In some cases, all polypeptide chains of a heterodimeric or single-chain TMP of the present disclosure are encoded in a single nucleic acid. In some cases, a first nucleic acid comprises a nucleotide sequence encoding a first polypeptide of a heterodimeric TMP of the present disclosure; and a second nucleic acid comprises a nucleotide sequence encoding a second polypeptide of a heterodimeric TMP of the present disclosure. In some cases, single nucleic acid comprises a nucleotide sequence encoding a first polypeptide of a TMP of the present disclosure and a second polypeptide of a heterodimeric TMP of the present disclosure.

[0334] Separate Nucleic Acids Encoding Individual Polypeptide Chains of a Polypeptide

[0335] TMPAs noted above, in some cases, the individual polypeptide chains of a heterodimeric TMP of the present disclosure are encoded in separate nucleic acids. In some cases, nucleotide sequences encoding the separate polypeptide chains of a TMP of the present disclosure are operably linked to transcriptional control elements, e.g., promoters, such as promoters that are functional in a eukaryotic cell, where the promoter can be a constitutive promoter or an inducible promoter.

[0336] Thus, for example, the present disclosure provides a first nucleic acid and a second nucleic acid, where the first nucleic acid comprises separate nucleotide sequences encoding the first polypeptide of a heterodimeric TMP and the second nucleic acid comprises the separate nucleotide sequences encoding the second polypeptide of the heterodimeric TMP of the present disclosure. For example, in MOD position 1 discussed above for heterodimeric TMPs (see FIG. 17), where the first MHC polypeptide comprises a β2M polypeptide and the second polypeptide comprises an HLA heavy chain polypeptide, the first nucleic acid encodes a first polypeptide comprising, in order from N-terminus to C-terminus: i) a KRAS peptide; and ii) a β2M polypeptide, and the second nucleic acid encodes a second polypeptide comprising, in order from N-terminus to C-terminus: i) at least one immunomodulatory polypeptide; ii) an HLA heavy chain polypeptide; and iii) an Ig Fc polypeptide. As noted above, linkers optionally may be included between the individual components of both the first and second polypeptides. Similarly, e.g., for MOD position 3, the first nucleic acid encodes a first polypeptide comprising, in order from N-terminus to C-terminus: i) a KRAS peptide; and ii) a β2M polypeptide, and the second nucleic acid encodes a second polypeptide comprising, in order from N-terminus to C-terminus: i) an HLA heavy chain polypeptide; ii) an Ig Fc polypeptide, and iii) i) at least one immunomodulatory polypeptide. Again, linkers optionally may be included between the individual components of both the first and second polypeptides.

[0337] In some cases, the nucleotide sequences encoding the first and the second polypeptides are operably linked to transcriptional control elements. In some cases, the transcriptional control element is a promoter that is functional in a eukaryotic cell. In some cases, the nucleic acids are present in separate expression vectors.

[0338] Nucleic Acid Encoding Two or More Polypeptides Present in a Polypeptide

[0339] The present disclosure also provides a single nucleic acid comprising nucleotide sequences encoding at least the first polypeptide and the second polypeptide of a heterodimeric or single-chain TMP of the present disclosure. TMP Methods for preparing heterodimeric TMPs using a single nucleic acid are disclosed in published PCT application WO2020132138A1 and WO2019/051091, the disclosures of which as they pertain to nucleic acids encoding TMPs is expressly incorporated herein by reference, including specifically paragraphs [00507]-[00514] of WO2020132138A1 and paragraphs [00393]-[00400] of WO2019/051091.

### Recombinant Expression Vectors

[0340] The present disclosure provides recombinant expression vectors comprising nucleic acids of the present disclosure. In some cases, the recombinant expression vector is a non-viral vector. In some cases, the recombinant expression vector is a viral construct, e.g., a recombinant adeno-associated virus construct (see, e.g., U.S. Pat. No. 7,078,387), a recombinant adenoviral construct, a recombinant lentiviral construct, a recombinant retroviral construct, a non-integrating viral vector, etc.

[0341] Suitable expression vectors are disclosed in published PCT application WO2020132138A1 and WO2019/051091, the disclosures of which as they pertain to such expression vectors are expressly incorporated herein by reference, including specifically paragraphs [00515]-[00520] of WO2020132138A1 and paragraphs [00401]-[00406] of WO2019/051091.

### Genetically Modified Host Cells

[0342] The present disclosure provides a genetically modified host cell, where the host cell is genetically modified with a nucleic acid of the present disclosure.

[0343] Suitable host cells include eukaryotic cells, such as yeast cells, insect cells, and mammalian cells. In some cases, the host cell is a cell of a mammalian cell line. Suitable mammalian cell lines include human cell lines, non-human primate cell lines, rodent (e.g., mouse, rat) cell lines, and the like. Suitable mammalian cell lines include, but are not limited to, HeLa cells (e.g., American Type Culture Collection (ATCC) No. CCL-2), CHO cells (e.g., ATCC Nos. CRL9618, CCL61, CRL9096), 293 cells (e.g., ATCC No. CRL-1573), Vero cells, NIH 3T3 cells (e.g., ATCC No. CRL-1658), Huh-7 cells, BHK cells (e.g., ATCC No. CCL10), PC12 cells (ATCC No. CRL1721), COS cells, COS-7 cells (ATCC No. CRL1651), RAT1 cells, mouse L cells (ATCC No. CCLI.3), human embryonic kidney (HEK) cells (ATCC No. CRL1573), HLHepG2 cells, and the like.

[0344] In some cases, the host cell is a mammalian cell that has been genetically modified such that it does not synthesize endogenous MHC β2-M.

[0345] In some cases, the host cell is a mammalian cell that has been genetically modified such that it does not synthesize endogenous MHC class I heavy chain. In some cases, the host cell is a mammalian cell that has been genetically modified such that it does not synthesize endogenous MHC β2-M and such that it does not synthesize endogenous MHC class I heavy chain.

[0346] As noted above, a TMP is in some cases is a single-chain polypeptide (e.g., consists of a single polypeptide chain; or is a homodimer of a single polypeptide chain). It was observed that single-chain TMPs are produced intact and full-length, i.e., without cleavage of the polypeptide chain. A single-chain TMP can in some cases be produced in greater quantities than a heterodimeric TMP.

### Compositions

[0347] The present disclosure provides compositions, including pharmaceutical compositions, comprising a TMP (synTac) of the present disclosure. The present disclosure provides compositions, including pharmaceutical compositions, comprising a TMP of the present disclosure. The present disclosure provides compositions, including pharmaceutical compositions, comprising a nucleic acid or a recombinant expression vector of the present disclosure.

[0348] Compositions Comprising a TMP

[0349] A composition of the present disclosure can comprise, in addition to a TMP of the present disclosure, one or more of: a salt, e.g., NaCl, MgCl₂, KCl, MgSO₄, etc.; a buffering agent, a solubilizing agent; a detergent, e.g., a non-ionic detergent such as Tween-20, etc.; a protease inhibitor; glycerol; and the like. The composition also may comprise a pharmaceutically acceptable excipient, a variety of which are known in the art and need not be discussed in detail herein. Examples of pharmaceutically acceptable salts, buffering agents, excipients, formulations, dosage forms, etc. are disclosed in published PCT applications WO2020132138A1 and WO2019/051091, the disclosures of which as they pertain to compositions comprising TMPs of this disclosure are expressly incorporated herein by reference, including specifically paragraphs [00526]-[00536] of WO2020132138A1 and paragraphs [00412]-[00422] of WO2019/051091.

[0350] Where a TMP of the present disclosure is administered as an injectable (e.g. subcutaneously, intraperitoneally, intramuscularly, and/or intravenously) directly into a tissue, a formulation can be provided as a ready-to-use dosage form that may be directly injected or infused into the patient or admixed with a saline solution for infusion, or possibly as a non-aqueous form (e.g. a reconstitutable storage-stable powder) or aqueous form, such as liquid composed of pharmaceutically acceptable carriers and excipients. Formulations may also be provided so as to enhance serum half-life of the TMP following administration. For example, the TMP may be provided in a liposome formulation, prepared as a colloid, or other conventional techniques for extending serum half-life. A variety of methods are available for preparing liposomes, as described in, e.g., Szoka et al. 1980 Ann. Rev. Biophys. Bioeng. 9:467, U.S. Pat. Nos. 4,235,871, 4,501,728 and 4,837,028. The preparations may also be provided in controlled release or slow-release forms.

[0351] The concentration of a TMP of the present disclosure in a liquid composition formulation can vary widely (e.g., from less than about 0.1%, usually at or at least about 2% to as much as 20% to 50% or more by weight). Included within this range is a concentration of from about 5 to about 15 mg/mL, including about 5 mg/mL, about 6 mg/mL, about 7 mg/mL, about 8 mg/mL, about 9 mg/mL, about 10 mg/mL, about 11 mg/mL, about 12 mg/mL, about 13 mg/mL, about 14 mg/mL and about 15 mg/mL, The concentration may depend on numerous factors, including the stability of the TMP in the liquid composition.

[0352] In some cases, a TMP of the present disclosure is present in a liquid composition. TMP In some cases, a composition of the present disclosure comprises: a) a TMP of the present disclosure; and b) saline (e.g., 0.9% NaCl). In some cases, the composition is sterile and suitable for administration to a human subject.

### Compositions Comprising a Nucleic Acid or a Recombinant Expression Vector

[0353] The present disclosure provides compositions, e.g., pharmaceutical compositions, comprising a nucleic acid or a recombinant expression vector of the present disclosure. Published PCT applications WO2020132138A1 and WO2019/051091 disclose how to prepare such compositions. See, paragraphs [00537]-[00546] of WO2020132138A1 and paragraphs [00423]-[00432] of WO2019/051091, the disclosures of which are expressly incorporated herein by reference.

### Methods of Modulating T Cell Activity

[0354] The present disclosure provides a method of selectively modulating the activity of an epitope-specific T cell (e.g., a T cell specific for a KRAS epitope, such as a KRAS peptide comprising a cancer-associated mutation), the method comprising contacting the T cell with a TMP of the present disclosure, where contacting the T cell with a TMP of the present disclosure selectively modulates the activity of the epitope-specific T cell. In some cases, the contacting occurs in vitro. In some cases, the contacting occurs in vivo.

[0355] Where a TMP of the present disclosure includes an immunomodulatory polypeptide that is an activating polypeptide, contacting the T cell with the TMP activates the epitope-specific T cell. In some instances, the epitope-specific T cell is a T cell that is specific for an epitope present on a cancer cell, and contacting the epitope-specific T cell with the TMP increases cytotoxic activity of the T cell toward the cancer cell and/or increases the number of the epitope-specific T cells.

[0356] The present disclosure provides a method of modulating an immune response in an individual, the method comprising administering to the individual an effective amount of a TMP of the present disclosure. Administering the TMP induces an epitope-specific T cell response (e.g., cancer epitope-specific T-cell response) and an epitope-non-specific T cell response, where the ratio of the epitope-specific T cell response to the epitope-non-specific T cell response is at least 2:1. In some cases, the ratio of the epitope-specific T cell response to the epitope-non-specific T cell response is at least 5:1. In some cases, the ratio of the epitope-specific T cell response to the epitope-non-specific T cell response is at least 10:1. In some cases, the ratio of the epitope-specific T cell response to the epitope-non-specific T cell response is at least 25:1. In some cases, the ratio of the epitope-specific T cell response to the epitope-non-specific T cell response is at least 50:1. In some cases, the ratio of the epitope-specific T cell response to the epitope-non-specific T cell response is at least 100:1. In some cases, the individual is a human. In some cases, the modulating increases a cytotoxic T-cell response to a cancer cell, e.g., a cancer cell expressing an antigen that displays the same epitope displayed by the KRAS epitope present in the TMP and/or increases the number of T cells specific for the KRAS epitope. In some cases, the administering is intravenous, subcutaneous, intramuscular, systemic, intralymphatic, distal to a treatment site, local, or at or near a treatment site.

[0357] The present disclosure provides a method of delivering an immunomodulatory polypeptide selectively to target T cell, the method comprising contacting a mixed population of T cells with a TMP of the present disclosure, where the mixed population of T cells comprises the target T cell and non-target T cells, where the target T cell is specific for the epitope present within the TMP (e.g., where the target T cell is specific for the epitope present within the TMP), and where the contacting step delivers the one or more immunomodulatory polypeptides present within the TMP to the target T cell. In some cases, the population of T cells is in vitro. In some cases, the population of T cells is in vivo in an individual. In some cases, the method comprises administering the TMP to the individual. In some case, the T cell is a cytotoxic T cell. In some cases, the mixed population of T cells is an in vitro population of mixed T cells obtained from an individual, and the contacting step results in activation and/or proliferation of the target T cell, generating a population of activated and/or proliferated target T cells; in some of these instances, the method further comprises administering the population of activated and/or proliferated target T cells to the individual.

[0358] The present disclosure provides a method of detecting, in a mixed population of T cells obtained from an individual, the presence of a target T cell that binds an epitope of interest (e.g., a cancer epitope; a KRAS peptide comprising a cancer-associated mutation), the method comprising: a) contacting in vitro the mixed population of T cells with a TMP of the present disclosure, wherein the TMP comprises the KRAS epitope of interest; and b) detecting activation and/or proliferation of T cells in response to said contacting, wherein activated and/or proliferated T cells indicates the presence of the target T cell.

### Treatment Methods

[0359] The present disclosure provides a method of treatment of an individual, the method comprising administering to the individual an amount of a TMP of the present disclosure, or one or more nucleic acids encoding the TMP, effective to treat the individual. Also provided is a TMP of the present disclosure for use in a method of treatment of the human or non-human animal body. In some cases, a treatment method of the present disclosure comprises administering to an individual in need thereof one or more recombinant expression vectors comprising nucleotide sequences encoding a TMP of the present disclosure. In some cases, a treatment method of the present disclosure comprises administering to an individual in need thereof one or more mRNA molecules comprising nucleotide sequences encoding a TMP of the present disclosure. In some cases, a treatment method of the present disclosure comprises administering to an individual in need thereof a TMP of the present disclosure. Conditions that can be treated include, e.g., cancer, such as a cancer that expresses a KRAS polypeptide, e.g., a mutant KRAS polypeptide, as described above.

[0360] In some cases, a TMP of the present disclosure, when administered to an individual in need thereof, induces both an epitope-specific T cell response and an epitope non-specific T cell response. In other words, in some cases, a TMP of the present disclosure, when administered to an individual in need thereof, induces an epitope-specific T cell response by modulating the activity of a first T cell that displays both: i) a TCR specific for the epitope present in the TMP; ii) a costimulatory polypeptide that binds to the immunomodulatory polypeptide present in the TMP; and induces an epitope non-specific T cell response by modulating the activity of a second T cell that displays: i) a TCR specific for an epitope other than the epitope present in the TMP; and ii) a costimulatory polypeptide that binds to the immunomodulatory polypeptide present in the TMP. The ratio of the epitope-specific T cell response to the epitope-non-specific T cell response is at least 2:1, at least 5:1, at least 10:1, at least 15:1, at least 20:1, at least 25:1, at least 50:1, or at least 100:1. The ratio of the epitope-specific T cell response to the epitope-non-specific T cell response is from about 2:1 to about 5:1, from about 5:1 to about 10:1, from about 10:1 to about 15:1, from about 15:1 to about 20:1, from about 20:1 to about 25:1, from about 25:1 to about 50:1, or from about 50:1 to about 100:1, or more than 100:1. “Modulating the activity” of a T cell can include one or more of: i) activating a cytotoxic (e.g., CD8⁺) T cell; ii) inducing cytotoxic activity of a cytotoxic (e.g., CD8⁺) T cell; iii) inducing production and release of a cytotoxin (e.g., a perforin; a granzyme; a granulysin) by a cytotoxic (e.g., CD8⁺) T cell; and iv) increasing the number of cytotoxic (e.g., CD8⁺) T cells.

[0361] Where a MOD is a reduced-affinity variant of a wild-type MOD, the combination of the reduced affinity of the MOD for its cognate costimulatory polypeptide, and the affinity of the epitope for a TCR, provides for enhanced selectivity of a TMP of the present disclosure. Thus, for example, a TMP of the present disclosure binds with higher avidity to a first T cell that displays both: i) a TCR specific for the epitope present in the TMP; and ii) a costimulatory polypeptide that binds to the immunomodulatory polypeptide present in the TMP, compared to the avidity to which it binds to a second T cell that displays: i) a TCR specific for an epitope other than the epitope present in the TMP; and ii) a costimulatory polypeptide that binds to the immunomodulatory polypeptide present in the TMP.

[0362] The present disclosure thus provides a method of selectively modulating the activity of an epitope-specific T cell in an individual, the method comprising administering to the individual an effective amount of a TMP of the present disclosure, or one or more nucleic acids (e.g., expression vectors; mRNA; etc.) comprising nucleotide sequences encoding the TMP, where the TMP selectively modulates the activity of the epitope-specific T cell in the individual. Selectively modulating the activity of an epitope-specific T cell can treat a disease or disorder in the individual. Thus, the present disclosure provides a treatment method comprising administering to an individual in need thereof an effective amount of a TMP of the present disclosure.

[0363] In some cases, the immunomodulatory polypeptide (“MOD”) is an activating polypeptide, and the TMP activates the epitope-specific T cell. In some cases, the TMP increases the activity of a T cell specific for the KRAS epitope. In some cases, the MOD is an activating polypeptide, and the TMP activates an epitope-specific T-cell (e.g., a T-cell specific for a KRAS epitope). In some cases, the T cells are T-helper cells (CD4⁺ cells), cytotoxic T-cells (CD8⁺ cells), or NK-T-cells. In some cases, the epitope is a cancer epitope, and the TMP increases the activity of a T-cell specific for a cancer cell expressing the KRAS cancer epitope (e.g., T-helper cells (CD4⁺ cells), cytotoxic T-cells (CD8⁺ cells), and/or NK-T-cells). Activation of CD4⁺ T cells can include increasing proliferation of CD4⁺ T cells and/or inducing or enhancing release cytokines by CD4⁺ T cells. Activation of NK-T-cells and/or CD8⁺ cells can include: increasing proliferation of NK-T-cells and/or CD8⁺ cells; and/or inducing release of cytokines such as interferon γ by NK-T-cells and/or CD8⁺ cells.

[0364] A TMP of the present disclosure can be administered to an individual in need thereof to treat a cancer in the individual, where the cancer expresses the KRAS peptide present in the TMP. For example, the cancer can be one in which the cancer cells express or over-express KRAS, e.g., a mutated form of KRAS, as described above. The present disclosure provides a method of treating cancer in an individual, the method comprising administering to the individual an effective amount of a TMP of the present disclosure, or one or more nucleic acids (e.g., expression vectors; mRNA; etc.) comprising nucleotide sequences encoding the TMP, where the TMP comprises a T-cell epitope that is a KRAS epitope, and where the TMP comprises a stimulatory immunomodulatory polypeptide. In some cases, an “effective amount” of a TMP of the present disclosure is an amount that, when administered in one or more doses to an individual in need thereof, reduces the number of cancer cells in the individual. For example, in some cases, an “effective amount” of a TMP of the present disclosure is an amount that, when administered in one or more doses to an individual in need thereof, reduces the number of cancer cells in the individual by at least 10%, at least 15%, at least 20%, at least 25%, at least 30%, at least 40%, at least 50%, at least 60%, at least 70%, at least 80%, at least 90%, or at least 95%, compared to the number of cancer cells in the individual before administration of the TMP, or in the absence of administration with the TMP. In some cases, an “effective amount” of a TMP of the present disclosure is an amount that, when administered in one or more doses to an individual in need thereof, reduces the number of cancer cells in the individual, including to substantially undetectable levels.

[0365] In some cases, an “effective amount” of a TMP of the present disclosure is an amount that, when administered in one or more doses to an individual in need thereof, reduces the tumor mass in the individual. For example, in some cases, an “effective amount” of a TMP of the present disclosure is an amount that, when administered in one or more doses to an individual in need thereof (an individual having a tumor), reduces the tumor mass in the individual by at least 10%, at least 15%, at least 20%, at least 25%, at least 30%, at least 40%, at least 50%, at least 60%, at least 70%, at least 80%, at least 90%, or at least 95%, compared to the tumor mass in the individual before administration of the TMP, or in the absence of administration with the TMP. In some cases, an “effective amount” of a TMP of the present disclosure is an amount that, when administered in one or more doses to an individual in need thereof (an individual having a tumor), reduces the tumor volume in the individual. For example, in some cases, an “effective amount” of a TMP of the present disclosure is an amount that, when administered in one or more doses to an individual in need thereof (an individual having a tumor), reduces the tumor volume in the individual by at least 10%, at least 15%, at least 20%, at least 25%, at least 30%, at least 40%, at least 50%, at least 60%, at least 70%, at least 80%, at least 90%, or at least 95%, compared to the tumor volume in the individual before administration of the TMP, or in the absence of administration with the TMP. In some cases, an “effective amount” of a TMP of the present disclosure is an amount that, when administered in one or more doses to an individual in need thereof, increases survival time of the individual. For example, in some cases, an “effective amount” of a TMP of the present disclosure is an amount that, when administered in one or more doses to an individual in need thereof, increases survival time of the individual by at least 1 month, at least 2 months, at least 3 months, from 3 months to 6 months, from 6 months to 1 year, from 1 year to 2 years, from 2 years to 5 years, from 5 years to 10 years, or more than 10 years, compared to the expected survival time of the individual in the absence of administration with the TMP.

[0366] Cancers that can be treated with a method of the present disclosure include cancers in which the cancer cells express a mutated form of KRAS. Examples include adenocarcinomas and hematological malignancies. Examples of cancers that can be treated with a method of the present disclosure include multiple myeloma; B-cell lymphoma; breast cancer; lung cancer; ovarian carcinoma; pancreatic cancer; colorectal cancer; prostate cancer; renal cancer; acute myelogenous leukemia; mesothelioma; thyroid cancer; head and neck cancer; stomach cancer; urothelial cancer; cervical cancer; and ovarian endometrial cancer.

[0367] As noted above, in some cases, in carrying out a subject treatment method, a TMP of the present disclosure is administered to an individual in need thereof, as the TMP per se. In other instances, in carrying out a subject treatment method, one or more nucleic acids comprising nucleotide sequences encoding a TMP of the present disclosure is/are administering to an individual in need thereof. Thus, in other instances, one or more nucleic acids of the present disclosure, e.g., one or more recombinant expression vectors of the present disclosure, is/are administered to an individual in need thereof.

[0368] As discussed above, an APP of this disclosure also can be administered to a patient for therapeutic purposes in those instances where it is desired to engage the TCR of a T cell that is specific for the KRAS peptide of the APP. In such instances, the presence of a naturally occurring immunomodulatory polypeptide in the patient could effect modulation of the T cell when the APP is engaged with the TCR.

### Formulations

[0369] Suitable formulations are described above, where suitable formulations include a pharmaceutically acceptable excipient. In some cases, a suitable formulation comprises: a) a TMP of the present disclosure; and b) a pharmaceutically acceptable excipient. In some cases, a suitable formulation comprises: a) a nucleic acid comprising a nucleotide sequence encoding a TMP of the present disclosure; and b) a pharmaceutically acceptable excipient; in some instances, the nucleic acid is an mRNA. In some cases, a suitable formulation comprises: a) a first nucleic acid comprising a nucleotide sequence encoding the first polypeptide of a TMP of the present disclosure; b) a second nucleic acid comprising a nucleotide sequence encoding the second polypeptide of a TMP of the present disclosure; and c) a pharmaceutically acceptable excipient. In some cases, a suitable formulation comprises: a) a recombinant expression vector comprising a nucleotide sequence encoding a TMP of the present disclosure; and b) a pharmaceutically acceptable excipient. In some cases, a suitable formulation comprises: a) a first recombinant expression vector comprising a nucleotide sequence encoding the first polypeptide of a TMP of the present disclosure; b) a second recombinant expression vector comprising a nucleotide sequence encoding the second polypeptide of a TMP of the present disclosure; and c) a pharmaceutically acceptable excipient. Suitable pharmaceutically acceptable excipients are described above.

### Dosages

[0370] A suitable dosage can be determined by an attending physician or other qualified medical personnel, based on various clinical factors. As is well known in the medical arts, dosages for any one patient depend upon many factors, including the patient's size, body surface area, age, the particular polypeptide or nucleic acid to be administered, sex of the patient, time, and route of administration, general health, and other drugs being administered concurrently. A TMP of the present disclosure may be administered in amounts between 0.1 mg/kg body weight and 20 mg/kg body weight per dose, e.g. between 0.1 mg/kg body weight to 10 mg/kg body weight, e.g. between 0.5 mg/kg body weight to 5 mg/kg body weight, between 1 mg/kg body weight to 5 mg/kg body weight; between 5 mg/kg body weight to 10 mg/kg body weight; between 10 mg/kg body weight to 15 mg/kg body weight; between 15 mg/kg body weight to 20 mg/kg body weight, however, doses above this exemplary range are envisioned, especially considering the aforementioned factors. If the regimen is a continuous infusion, it can also be in the range of 1 μg to 10 mg per kilogram of body weight per minute. A TMP of the present disclosure can be administered in an amount of from about 1 mg/kg body weight to 50 mg/kg body weight, e.g., from about 1 mg/kg body weight to about 5 mg/kg body weight, from about 5 mg/kg body weight to about 10 mg/kg body weight, from about 10 mg/kg body weight to about 15 mg/kg body weight, from about 15 mg/kg body weight to about 20 mg/kg body weight, from about 20 mg/kg body weight to about 25 mg/kg body weight, from about 25 mg/kg body weight to about 30 mg/kg body weight, from about 30 mg/kg body weight to about 35 mg/kg body weight, from about 35 mg/kg body weight to about 40 mg/kg body weight, or from about 40 mg/kg body weight to about 50 mg/kg body weight.

[0371] Persons of ordinary skill in the art can easily estimate repetition rates for dosing based on measured residence times and concentrations of the administered agent in bodily fluids or tissues. Following successful treatment, it may be desirable to have the patient undergo maintenance therapy to prevent the recurrence of the disease state, wherein a TMP of the present disclosure is administered in maintenance doses, ranging from about 1 mg/kg body weight to about 5 mg/kg body weight, from about 5 mg/kg body weight to about 10 mg/kg body weight, from about 10 mg/kg body weight to about 15 mg/kg body weight, from about 15 mg/kg body weight to about 20 mg/kg body weight, or amounts exceeding 20 mg/kg of body weight.

[0372] Those of skill will readily appreciate that dose levels can vary as a function of the specific TMP, the severity of the symptoms and the susceptibility of the subject to side effects. Preferred dosages for a given compound are readily determinable by those of skill in the art by a variety of means.

[0373] In some cases, multiple doses of a TMP of the present disclosure, a nucleic acid of the present disclosure, or a recombinant expression vector of the present disclosure are administered. The frequency of administration of a TMP of the present disclosure, a nucleic acid of the present disclosure, or a recombinant expression vector of the present disclosure can vary depending on any of a variety of factors, e.g., severity of the symptoms, etc. For example, in some cases, a TMP of the present disclosure, a nucleic acid of the present disclosure, or a recombinant expression vector of the present disclosure is administered once per month, twice per month, three times per month, every other week (qow), once per week (qw), once every two weeks, once every three weeks, once every four weeks, twice per week (biw), three times per week (tiw), four times per week, five times per week, six times per week, every other day (qod), daily (qd), twice a day (qid), or three times a day (tid).

[0374] The duration of administration of a TMP of the present disclosure, a nucleic acid of the present disclosure, or a recombinant expression vector of the present disclosure, e.g., the period of time over which a TMP of the present disclosure, a nucleic acid of the present disclosure, or a recombinant expression vector of the present disclosure is administered, can vary, depending on any of a variety of factors, e.g., patient response, etc. For example, a TMP of the present disclosure, a nucleic acid of the present disclosure, or a recombinant expression vector of the present disclosure can be administered over a period of time ranging from about one day to about one week, from about two weeks to about four weeks, from about one month to about two months, from about two months to about four months, from about four months to about six months, from about six months to about eight months, from about eight months to about 1 year, from about 1 year to about 2 years, or from about 2 years to about 4 years, or more.

### Routes of Administration

[0375] An active agent (a TMP of the present disclosure, a nucleic acid of the present disclosure, or a recombinant expression vector of the present disclosure) is administered to an individual using any available method and route suitable for drug delivery, including in vivo and in vitro methods, as well as systemic and localized routes of administration.

[0376] A TMP of this disclosure typically will be delivered via intravenous administration, but other conventional and pharmaceutically acceptable routes of administration may be used, including intratumoral, peritumoral, intramuscular, intralymphatic, intratracheal, intracranial, subcutaneous, intradermal, topical application, intraarterial, rectal, nasal, oral, and other enteral and parenteral routes of administration. Routes of administration may be combined, if desired, or adjusted depending upon the TMP and/or the desired effect. A TMP of the present disclosure, or a nucleic acid or recombinant expression vector of the present disclosure, can be administered in a single dose or in multiple doses.

[0377] A TMP of the present disclosure, a nucleic acid of the present disclosure, or a recombinant expression vector of the present disclosure can be administered to a host using any available conventional methods and routes suitable for delivery of conventional drugs, including systemic or localized routes. In general, routes of administration contemplated for use in a method of the present disclosure include, but are not necessarily limited to, enteral, parenteral, and inhalational routes.

### Combination Therapy

[0378] A TMP of the present disclosure can be administered to an individual in need thereof in combination with one or more additional therapeutic agents or therapeutic treatment. A suitable dosage amount of the TMP will be the same as the dosage amount for monotherapy with the APP (described above) or may be less or more than the monotherapy dose. Suitable additional therapeutic agents include, e.g.: i) an immune checkpoint inhibitor; ii) a cancer chemotherapeutic agent; iii) an agent that inhibits a cancer-associated mutated form of KRAS; and iv) one or more additional TMPs. Suitable additional therapeutic treatments include, e.g., radiation, surgery (e.g., surgical resection of a tumor), and the like.

[0379] In some cases, the method comprises administering to an individual in need thereof: a) a first composition comprising a TMP of the present disclosure; and b) a second composition comprising an immune checkpoint inhibitor. In some cases, the method comprises administering to an individual in need thereof: a) a first composition comprising a TMP of the present disclosure; and b) a second composition comprising an agent that inhibits a cancer-associated mutated form of KRAS such as KRAS (G12C). In some cases, the method comprises administering to an individual in need thereof: a) a first composition comprising a TMP of the present disclosure; and b) a second composition comprising a second TMP.

[0380] A TMP of the present disclosure can be administered to an individual in need thereof at the same time, or at different times, as the one or more additional therapeutic agent is administered.

[0381] Thus, for example, a treatment method of the present disclosure can comprise co-administration of a TMP of the present disclosure and at least one additional therapeutic agent. By “co-administration” is meant that both a TMP of the present disclosure and at least one additional therapeutic agent are administered to an individual, although not necessarily at the same time, in order to achieve a therapeutic effect that is the result of having administered both the TMP and the at least one additional therapeutic agent. The administration of the TMP and the at least one additional therapeutic agent can be substantially simultaneous, e.g., the TMP can be administered to an individual within about 1 minute to about 24 hours (e.g., within about 1 minute, within about 5 minutes, within about 15 minutes, within about 30 minutes, within about 1 hour, within about 4 hours, within about 8 hours, within about 12 hours, or within about 24 hours) of administration of the at least one additional therapeutic agent. In some cases, a TMP of the present disclosure is administered to an individual who is undergoing treatment with, or who has undergone treatment with, the at least one additional therapeutic agent. The administration of the TMP and the at least one additional therapeutic agent can occur at different times and/or at different frequencies.

[0382] As another example, a treatment method of the present disclosure can comprise co-administration of a TMP of the present disclosure and an immune checkpoint inhibitor such as an antibody specific for an immune checkpoint. By “co-administration” is meant that both a TMP of the present disclosure and an antibody specific for an immune checkpoint are administered to an individual, although not necessarily at the same time, in order to achieve a therapeutic effect that is the result of having administered both the TMP and the immune checkpoint inhibitor. The administration of the TMP and the antibody specific for an immune checkpoint can be substantially simultaneous, e.g., the TMP can be administered to an individual within about 1 minute to about 24 hours (e.g., within about 1 minute, within about 5 minutes, within about 15 minutes, within about 30 minutes, within about 1 hour, within about 2 hours, within about 4 hours, within about 8 hours, within about 12 hours, or within about 24 hours) of administration of the antibody specific for an immune checkpoint. In some cases, a TMP of the present disclosure is administered to an individual who is undergoing treatment with, or who has undergone treatment with, an antibody specific for an immune checkpoint. The administration of the TMP and the antibody specific for an immune checkpoint can occur at different times and/or at different frequencies.

[0383] Exemplary immune checkpoint inhibitors include inhibitors that target immune checkpoint polypeptide such as CD27, CD28, CD40, CD122, CD96, CD73, CD47, OX40, GITR, CSF1R, JAK, PI3K delta, PI3K gamma, TAM, arginase, CD137 (also known as 4-1BB), ICOS, A2AR, B7-H3, B7-H4, BTLA, CTLA-4, LAG3, TIM3, VISTA, CD96, TIGIT, CD122, PD-1, PD-L1 and PD-L2. In some cases, the immune checkpoint polypeptide is a stimulatory checkpoint molecule selected from CD27, CD28, CD40, ICOS, OX40, GITR, CD122, and CD137. In some cases, the immune checkpoint polypeptide is an inhibitory checkpoint molecule selected from A2AR, B7-H3, B7-H4, BTLA, CTLA-4, IDO, KIR, LAG3, PD-1, TIM3, CD96, TIGIT, and VISTA.

[0384] In some cases, the immune checkpoint inhibitor is an antibody specific for an immune checkpoint. Suitable anti-immune checkpoint antibodies include, but are not limited to, nivolumab (Bristol-Myers Squibb), pembrolizumab (Merck), pidilizumab (Curetech), AMP-224 (GlaxoSmithKline/Amplimmune), MPDL3280A (Roche), MDX-1105 (Medarex, Inc./Bristol Myer Squibb), MEDI-4736 (Medimmune/AstraZeneca), arelumab (Merck Serono), ipilimumab (YERVOY, (Bristol-Myers Squibb), tremelimumab (Pfizer), pidilizumab (CureTech, Ltd.), TMP321 (Immutep S.A.), MGA271 (Macrogenics), BMS-986016 (Bristol-Meyers Squibb), lirilumab (Bristol-Myers Squibb), urelumab (Bristol-Meyers Squibb), PF-05082566 (Pfizer), IPH2101 (Innate Pharma/Bristol-Myers Squibb), MEDI-6469 (MedImmune/AZ), CP-870,893 (Genentech), Mogamulizumab (Kyowa Hakko Kirin), Varlilumab (CelIDex Therapeutics), Avelumab (EMD Serono), Galiximab (Biogen Idec), AMP-514 (Amplimmune/AZ), AUNP 12 (Aurigene and Pierre Fabre), Indoximod (NewLink Genetics), NLG-919 (NewLink Genetics), INCB024360 (Incyte); KN035; and combinations thereof. For example, in some cases, the immune checkpoint inhibitor is an anti-PD-1 antibody. Suitable anti-PD-1 antibodies include, e.g., nivolumab, pembrolizumab (also known as MK-3475), pidilizumab, SHR-1210, PDR001, and AMP-224. In some cases, the anti-PD-1 monoclonal antibody is nivolumab, pembrolizumab or PDR001. Suitable anti-PD1 antibodies are described in U.S. Patent Publication No. 2017/0044259. For pidilizumab, see, e.g., Rosenblatt et al. (2011) J. Immunother. 34:409-18. In some cases, the immune checkpoint inhibitor is an anti-CTLA-4 antibody. In some cases, the anti-CTLA-4 antibody is ipilimumab or tremelimumab. For tremelimumab, see, e.g., Ribas et al. (2013) J. Clin. Oncol. 31:616-22. In some cases, the immune checkpoint inhibitor is an anti-PD-L1 antibody. In some cases, the anti-PD-L1 monoclonal antibody is BMS-935559, MEDI4736, MPDL3280A (also known as RG7446), KN035, or MSB0010718C. In some embodiments, the anti-PD-L1 monoclonal antibody is MPDL3280A (atezolizumab) or MEDI4736 (durvalumab). For durvalumab, see, e.g., WO 2011/066389. For atezolizumab, see, e.g., U.S. Pat. No. 8,217,149.

[0385] In some cases, the at least one additional therapeutic agent is an agent that selectively inhibits a mutant form of KRAS such as KRAS (G12C), KRAS (K117A), and the like. Examples of agents that selectively inhibit a mutant form of KRAS include ARS-1620; AMG510; KRA-533; and MRTX849.

[0386] AMG150 has the following structure:

[chemical structure]

[0387] ARS-1620 has the following structure:

[chemical structure]

[0388] In some cases, the at least one additional therapeutic agent comprises one or more additional TMPs. In some cases, the method comprises administering to an individual in need thereof: a) a first composition comprising a first TMP, where the first TMP is a TMP of the present disclosure; and b) a second composition comprising a second TMP, where the second TMP is a TMP of the present disclosure that is different from the first TMP of the present disclosure, e.g., comprising a different KRAS epitope and/or one or more different MODs. In addition, or alternatively, the one or more additional TMPs can comprise an epitope that is a cancer-associated peptide other than a KRAS peptide epitope.

### Subjects Suitable for Treatment

[0389] Subjects suitable for treatment with a method of the present disclosure include individuals who have cancer, including individuals who have been diagnosed as having cancer, individuals who have been treated for cancer but who failed to respond to the treatment, and individuals who have been treated for cancer and who initially responded but subsequently became refractory to the treatment. Subjects suitable for treatment with a method of the present disclosure include individuals having a cancer in which the cancer cells express a mutated form of KRAS, where the mutated form of KRAS is a cancer-associated mutated form. Subjects suitable for treatment with a method of the present disclosure include individuals having a cancer such as multiple myeloma; B-cell lymphoma; breast cancer; lung cancer; ovarian carcinoma; pancreatic cancer; colorectal cancer; prostate cancer; renal cancer; acute myelogenous leukemia; mesothelioma; thyroid cancer; head and neck cancer; stomach cancer; urothelial cancer; cervical cancer; and ovarian endometrial cancer.

[0390] In some cases, the subject is an individual who is undergoing treatment with an immune checkpoint inhibitor. In some cases, the subject is an individual who has undergone treatment with an immune checkpoint inhibitor, but whose disease has progressed despite having received such treatment. In some cases, the subject is an individual who is undergoing treatment with, or who has undergone treatment with, a cancer chemotherapeutic agent. In some cases, the subject is an individual who is preparing to undergo treatment with, is undergoing treatment with, or who has undergone treatment with, an immune checkpoint inhibitor. In some cases, the subject is an individual who is preparing to undergo treatment with, is undergoing treatment with, or who has undergone treatment with, a cancer chemotherapeutic agent, radiation treatment, surgery, and/or treatment with another therapeutic agent.

### EXAMPLES OF NON-LIMITING ASPECTS OF THE DISCLOSURE

[0391] Aspects, including embodiments, of the present subject matter described above may be beneficial alone or in combination, with one or more other aspects or embodiments. Without limiting the foregoing description, certain non-limiting aspects of the disclosure are provided below. As will be apparent to those of skill in the art upon reading this disclosure, each of the individually numbered aspects may be used or combined with any of the preceding or following individually numbered aspects. This is intended to provide support for all such combinations of aspects and is not limited to combinations of aspects explicitly provided below:

[0392] Aspect 1. A T-cell modulatory polypeptide (TMP) comprising:
[0393] i) a KRAS peptide comprising a KRAS epitope expressed on a cancer cell, wherein the KRAS peptide has a length of at least 4 amino acids;
[0394] ii) first major histocompatibility complex (MHC) polypeptide;
[0395] iii) a second MHC polypeptide, and
[0396] iv) at least one immunomodulatory polypeptide.

[0397] Aspect 2. A T-cell modulatory polypeptide according to aspect 1, further comprising in Ig Fc polypeptide.

[0398] Aspect 3. A T-cell modulatory polypeptide according to aspect 2, wherein the Ig Fc polypeptide is a human IgG1 Fc polypeptide that substantially does not induce cell lysis.

[0399] Aspect 4. A T-cell modulatory polypeptide of aspect 2 or 3, wherein IgG1 Fc polypeptide comprises one or more amino acid substitutions selected from N297A, L234A, L235A, L234F, L235E, and P331S.

[0400] Aspect 5. A T-cell modulatory polypeptide of aspect 4, wherein the IgG1 Fc polypeptide comprises the amino acid sequence of FIG. 3G.

[0401] Aspect 6. A T-cell modulatory polypeptide of any one of aspects 1-5, wherein the first major histocompatibility complex (MHC) polypeptide is a β2-microglobulin polypeptide; and wherein the second MHC polypeptide is an MHC class I heavy chain polypeptide.

[0402] Aspect 7. A T-cell modulatory polypeptide of aspect 5, wherein the β2-microglobulin polypeptide is joined to the KRAS peptide by a first linker.

[0403] Aspect 8. A T-cell modulatory polypeptide of any one of aspects 1-7, wherein the β2-microglobulin polypeptide and MHC class I heavy chain polypeptide are covalently linked to one another.

[0404] Aspect 9. A T-cell modulatory polypeptide of aspect 8, wherein the covalent linkage is via one or more disulfide bonds.

[0405] Aspect 10. A T-cell modulatory polypeptide of aspect 9, wherein the β2M polypeptide and the MHC heavy chain polypeptide are joined by a disulfide bond that joins a Cys residue in the β2M polypeptide and a Cys residue in the MHC heavy chain polypeptide.

[0406] Aspect 11. A T-cell modulatory polypeptide of aspect 10, wherein a Cys at amino acid residue 12 of the β2M polypeptide is disulfide bonded to a Cys at amino acid residue 236 of the MHC heavy chain polypeptide.

[0407] Aspect 12. A T-cell modulatory polypeptide of any one of aspects 7-11, wherein the first linker comprises a Cys and wherein a disulfide bond links a Cys present in the first linker with a Cys present in the MHC heavy chain polypeptide.

[0408] Aspect 13. A T-cell modulatory polypeptide of aspect 12, wherein the first linker comprises the sequence CGGGS (SEQ ID NO:141), GCGGS (SEQ ID NO:139), GGCGS (SEQ ID NO:587), GGGCS (SEQ ID NO:588) or GGGGC (SEQ ID NO:590) and a disulfide bond links the Cys in the linker with a Cys substituted for Tyr84 of the MHC heavy chain polypeptide.

[0409] Aspect 14. A T-cell modulatory polypeptide of aspect 13, wherein the first linker comprises the sequence CGGGS(GGGGS)n (SEQ ID NO:142) or GCGGS(GGGGS)n (SEQ ID NO:140), where n is an integer from 1-10, e.g., 2 or 3, and a disulfide bond links the Cys in the linker with a Cys substituted for Tyr84 of the MHC heavy chain polypeptide.

[0410] Aspect 15. A T-cell modulatory polypeptide of aspect 9-14, wherein the TMP comprises (i) a first disulfide bond between the Cys residue in the β2M polypeptide and a Cys residue in the MHC heavy chain polypeptide, and (ii) a second disulfide bond that links a Cys present in the first linker with a Cys present in the MHC heavy chain polypeptide.

[0411] Aspect 16. A T-cell modulatory polypeptide of aspect 15, wherein (i) a Cys at amino acid residue 12 of the β2M polypeptide is disulfide bonded to a Cys at amino acid residue 236 of the MHC heavy chain polypeptide, and (ii) the first linker comprises the sequence CGGGS (SEQ ID NO:141), GCGGS (SEQ ID NO:139), GGCGS (SEQ ID NO:587), GGGCS (SEQ ID NO:588) or GGGGC (SEQ ID NO:590) and a disulfide bond links the Cys in the linker with a Cys substituted for Tyr84 of the MHC heavy chain polypeptide.

[0412] Aspect 17. A T-cell modulatory polypeptide of aspect 16, wherein the first linker comprises the sequence CGGGS(GGGGS)n (SEQ ID NO:142) or GCGGS(GGGGS)n (SEQ ID NO:140), where n is an integer from 1-10, e.g., 2 or 3.

[0413] Aspect 18. A T-cell modulatory polypeptide of any of aspects 1-17, wherein a disulfide bond joins two Cys residues present in the MHC heavy chain polypeptide.

[0414] Aspect 19. A T-cell modulatory polypeptide of any one of aspects 1-18, wherein the MHC heavy chain polypeptide comprises:

[0415] a) an amino acid sequence having at least 95% amino acid sequence identity to the HLA-A*0101, HLA-A*0201, HLA-A*1101, HLA-A*2301, HLA-A*2402, HLA-A*2407, HLA-A*3303, or HLA-A*3401 amino acid sequence depicted in FIG. 7A; or

[0416] b) an amino acid sequence having at least 95% amino acid sequence identity to the HLA-B*0702, HLA-B*0801, HLA-B*1502, HLA-B*3802, HLA-B*4001, HLA-B*4601, or HLA-B*5301 amino acid sequence depicted in FIG. 8A; or

[0417] c) an amino acid sequence having at least 95% amino acid sequence identity to the HLA-C*0102, HLA-C*0303, HLA-C*0304, HLA-C*0401, HLA-C*0602, HLA-C*0701, HLA-C*0702, HLA-C*0801, or HLA-C*1502 depicted in FIG. 9A.

[0418] Aspect 20. A T-cell modulatory polypeptide of aspect 19, wherein the MHC heavy chain polypeptide comprises an amino acid sequence having at least 95% amino acid sequence identity to an HLA-A polypeptide selected from the group consisting of an HLA-A*0201 polypeptide, an HLA-A*1101 polypeptide, an HLA-A*3303 polypeptide, and an HLA-A*2401 polypeptide.

[0419] Aspect 21. A T-cell modulatory polypeptide of any one of aspects 1-20, wherein the at least one immunomodulatory polypeptide is a wild-type or variant of an activating immunomodulatory polypeptide.

[0420] Aspect 22. A T-cell modulatory polypeptide of any one of aspects 1-21, wherein the at least one immunomodulatory polypeptide is a wild-type or variant of an activating immunomodulatory polypeptide selected from the group consisting of an IL-2 polypeptide, a 4-1BBL polypeptide, a CD80 polypeptide, a CD86 polypeptide, or combinations thereof.

[0421] Aspect 23. A T-cell modulatory polypeptide of any one of aspects 1-22, wherein at least one of the at least one immunomodulatory polypeptide is a variant immunomodulatory polypeptide that exhibits reduced affinity to a cognate costimulatory polypeptide compared to the affinity of a corresponding wild-type immunomodulatory polypeptide for the cognate costimulatory polypeptide,

[0422] Aspect 24. A T-cell modulatory polypeptide of any one of aspects 21-23, wherein the at least one immunomodulatory polypeptide is a variant of IL-2 that substantially does not bind to IL-2Rα and has reduced affinity for IL-2RB.

[0423] Aspect 25. A T-cell modulatory polypeptide of aspect 24, wherein the variant IL-2 polypeptide comprises i) an H16A substitution and an F42A substitution; or ii) an H16T substitution and an F42A substitution.

[0424] Aspect 26. A T-cell modulatory polypeptide of any one of aspects 1-25, wherein the polypeptide comprises at least two immunomodulatory polypeptides, and wherein at least two of the immunomodulatory polypeptides are the same.

[0425] Aspect 27. A T-cell modulatory polypeptide of any one of aspects 25 or 26, wherein the 2 or more immunomodulatory polypeptides are in tandem.

[0426] Aspect 28. A T-cell modulatory polypeptide of aspect 27, comprising two variant IL-2 polypeptides in tandem, each one comprising i) an H16A substitution and an F42A substitution; or ii) an H16T substitution and an F42A substitution.

[0427] Aspect 29. A T-cell modulatory polypeptide of any one of aspects 1-28, wherein the KRAS peptide is a peptide of at least 4 amino acids in length, e.g., from 4 amino acids to about 25 amino acids (e.g., 4 amino acids (aa), 5 aa, 6 aa, 7 aa, 8 aa, 9 aa, 10 aa, 11 aa, 12 aa, 13 aa, 14 aa, 15 aa, 16 aa, 17 aa, 18 aa, 19 aa, 20 aa, 21 aa, 22 aa, 23 aa, 24 aa, or 25 aa, including within a range of from 4 to 20 amino acids, from 6 to 18 amino acids, from 8 to 15 amino acids, from 8 to 12 amino acids, from 5 to 10 amino acids, from 9-10 amino acids, from 10 to 20 amino acids, and from 15 to 25 amino acids in length).

[0428] Aspect 30. A T-cell modulatory polypeptide of aspect 29, wherein the KRAS peptide comprises a sequence selected from the group consisting of VVGADGVGK (SEQ ID NO:176), VVGACGVGK (SEQ ID NO:177), VVGAVGVGK (SEQ ID NO:178), VVVGADGVGK (SEQ ID NO:179), VVVGAVGVGK (SEQ ID NO:180), VVVGACGVGK (SEQ ID NO:181), VTGADGVGK (SEQ ID NO:182), VTGAVGVGK (SEQ ID NO:183), VTGACGVGK (SEQ ID NO:184), VTVGADGVGK (SEQ ID NO:185), VTVGAVGVGK (SEQ ID NO:186), and VTVGACGVGK (SEQ ID NO:187); and wherein the KRAS peptide has a length of 9 amino acids or 10 amino acids, or a length of at least 9 amino acids or 10 amino acids.

[0429] Aspect 31. A T-cell modulatory polypeptide of aspect 29, wherein the KRAS peptide comprises a sequence selected from the group consisting of: VVVGAGDVGK (SEQ ID NO:188); VVGAGDVGK (SEQ ID NO:189); VVVGARGVGK (SEQ ID NO:190); and VVGARGVGK (SEQ ID NO:191); and wherein the KRAS peptide has a length of 9 amino acids or 10 amino acids, or a length of at least 9 amino acids or 10 amino acids.

[0430] Aspect 32. A T-cell modulatory polypeptide of aspect 29, wherein the KRAS peptide comprises a sequence selected from the group consisting of LVVVGADGV (SEQ ID NO:192), LVVVGAVGV (SEQ ID NO:193), LVVVGACGV (SEQ ID NO:194), KLVVVGADGV (SEQ ID NO:195), KLVVVGAVGV (SEQ ID NO:196), KLVVVGACGV (SEQ ID NO:197), LLVVGADGV (SEQ ID NO:198), LLVVGAVGV (SEQ ID NO:199), LLVVGACGV (SEQ ID NO:200), FLVVVGADGV (SEQ ID NO:201), FLVVVGAVGV (SEQ ID NO:202), and FLVVVGACGV (SEQ ID NO:203); and wherein the KRAS peptide has a length of 9 amino acids or 10 amino acids, or a length of at least 9 amino acids or 10 amino acids.

[0431] Aspect 33. A T-cell modulatory polypeptide of aspect 29, wherein the KRAS peptide comprises a sequence selected from the group consisting of: KLVVVGAGDV (SEQ ID NO:204); and KLVVVGARGV (SEQ ID NO:205); wherein the KRAS peptide has a length of 9 amino acids or 10 amino acids, or a length of at least 9 amino acids or 10 amino acids.

[0432] Aspect 34. A T-cell modulatory polypeptide of aspect 29, wherein the KRAS peptide comprises a sequence selected from the group consisting: GAGDVGKSAL (SEQ ID NO:206); AGDVGKSAL (SEQ ID NO:207); DVGKSALTI (SEQ ID NO:208); GAVGVGKSAL (SEQ ID NO:209); AVGVGKSAL (SEQ ID NO:210); YKLVVVGAV (SEQ ID NO:211); ARGVGKSAL (SEQ ID NO:212); GARGVGKSAL (SEQ ID NO:213); EYKLVVVGAR (SEQ ID NO:214); RGVGKSALTI (SEQ ID NO:215); LVVVGARGV (SEQ ID NO:216); GADGVGKSAL (SEQ ID NO:217); ACGVGKSAL (SEQ ID NO:218); and GACGVGKSAL (SEQ ID NO:219); wherein the KRAS peptide has a length of 9 amino acids or 10 amino acids, or a length of at least 9 amino acids or 10 amino acids.

[0433] Aspect 35. A T-cell modulatory polypeptide of aspect 29, wherein the KRAS peptide comprises a sequence selected from the group consisting of: VVGAVGVGK (SEQ ID NO:178), VVVGAVGVGK (SEQ ID NO:180), VGAVGVGKS (SEQ ID NO:222), VGAVGVGKSA (SEQ ID NO:223), AVGVGKSAL (SEQ ID NO:210), AVGVGKSALT (SEQ ID NO:225), GAVGVGKSAL (SEQ ID NO:209), GAVGVGKSA (SEQ ID NO:227), LVVVGAVGVG (SEQ ID NO:228), LVVVGAVGV (SEQ ID NO:193), KLVVVGAVGV (SEQ ID NO:196), and KLVVVGAVG (SEQ ID NO:231); where the KRAS peptide has a length of 9 amino acids or 10 amino acids, or a length of at least 9 amino acids or 10 amino acids.

[0434] Aspect 36. A T-cell modulatory polypeptide of any one of aspects 29-35, wherein the KRAS peptide is a peptide of 9 or 10 amino acids in length.

[0435] Aspect 37. A T-cell modulatory polypeptide of aspect 36, wherein the KRAS peptide has the amino acid sequence VVGADGVGK (SEQ ID NO:176), VVGACGVGK (SEQ ID NO:177), or VVGAVGVGK (SEQ ID NO:178), and has a length of 9 amino acids.

[0436] Aspect 38. A T-cell modulatory polypeptide of aspect 36, wherein the KRAS peptide has the amino acid sequence VVVGADGVGK (SEQ ID NO:179), VVVGACGVGK (SEQ ID NO:181), or VVVGAVGVGK (SEQ ID NO:180), and has a length of 10 amino acids.

[0437] Aspect 39 A T-cell modulatory polypeptide of aspect 36, wherein the KRAS peptide has the amino acid sequence VTGADGVGK (SEQ ID NO:182), VTGACGVGK (SEQ ID NO:184), or VTGAVGVGK (SEQ ID NO:183), and has a length of 9 amino acids.

[0438] Aspect 40. A T-cell modulatory polypeptide of aspect 36, wherein the KRAS peptide has the amino acid sequence VTVGADGVGK (SEQ ID NO:185), VTVGACGVGK (SEQ ID NO:187), or VTVGAVGVGK (SEQ ID NO:186), and has a length of 10 amino acids.

[0439] Aspect 41. A T-cell modulatory polypeptide of aspect 32, wherein the KRAS peptide is KLVVVGADGV (SEQ ID NO:195) and the MHC heavy chain polypeptide comprises an amino acid sequence having at least 95% amino acid sequence identity to an HLA-A*0201 polypeptide.

[0440] Aspect 42. A T-cell modulatory polypeptide of aspect 32, wherein the KRAS peptide is VVVGADGVGK (SEQ ID NO:179) and the MHC heavy chain polypeptide comprises an amino acid sequence having at least 95% amino acid sequence identity to an HLA-A11*01 polypeptide.

[0441] Aspect 43. A T-cell modulatory polypeptide of aspect 37, wherein the KRAS peptide is VVGAVGVGK (SEQ ID NO:178) and the MHC heavy chain polypeptide comprises an amino acid sequence having at least 95% amino acid sequence identity to an HLA-A11*01 polypeptide.

[0442] Aspect 44. A heterodimeric T-cell modulatory polypeptide according to any one of aspects 1-43, comprising:
[0443] a) a first polypeptide comprising:
   [0444] i) a KRAS peptide comprising a KRAS epitope expressed on a cancer cell, wherein the KRAS peptide has a length of at least 4 amino acids; and
   [0445] ii) a β2-microglobulin polypeptide; and
[0446] b) an MHC class I heavy chain polypeptide, and
[0447] c) at least one immunomodulatory polypeptide, wherein the first and/or the second polypeptide comprises the immunomodulatory polypeptide.

[0448] Aspect 45. A heterodimeric T-cell modulatory polypeptide of aspect 44, wherein:
[0449] a1) the first polypeptide comprises, in order from N-terminus to C-terminus:
   [0450] i) the KRAS peptide; and
   [0451] ii) a β2-microglobulin polypeptide; and
[0452] b1) the second polypeptide comprises, in order from N-terminus to C-terminus:
   [0453] i) at least one immunomodulatory polypeptide;
   [0454] ii) an MHC class I heavy chain polypeptide; and
   [0455] iii) an Ig Fc polypeptide; or
[0456] a2) the first polypeptide comprises, in order from N-terminus to C-terminus:
   [0457] i) the KRAS peptide; and
   [0458] ii) a β2-microglobulin polypeptide; and
[0459] b2) the second polypeptide comprises, in order from N-terminus to C-terminus:
   [0460] i) an MHC class I heavy chain polypeptide; and
   [0461] ii) at least one immunomodulatory polypeptide; and
   [0462] iii) an immunoglobulin (Ig) Fc polypeptide; or
[0463] a3) the first polypeptide comprises, in order from N-terminus to C-terminus:
   [0464] i) the KRAS peptide; and
   [0465] ii) a β2-microglobulin polypeptide; and
[0466] b3) the second polypeptide comprises, in order from N-terminus to C-terminus:
   [0467] i) an MHC class I heavy chain polypeptide; and
   [0468] ii) an Ig Fc polypeptide; and
   [0469] iii) at least one immunomodulatory polypeptide; or
[0470] a4) the first polypeptide comprises, in order from N-terminus to C-terminus:
   [0471] i) at least one immunomodulatory polypeptide;
   [0472] ii) the KRAS peptide; and
   [0473] iii) a β2-microglobulin polypeptide; and
[0474] b4) the second polypeptide comprises, in order from N-terminus to C-terminus:
   [0475] i) an MHC class I heavy chain polypeptide; and
   [0476] ii) an Ig Fc polypeptide; or
[0477] a5) the first polypeptide comprises, in order from N-terminus to C-terminus:
   [0478] i) the KRAS peptide;
   [0479] ii) a β2-microglobulin polypeptide; and
   [0480] iii) at least one immunomodulatory polypeptide; and
[0481] b5) the second polypeptide comprises:
   [0482] i) an MHC class I heavy chain polypeptide; and
   [0483] ii) an Ig Fc polypeptide.

[0484] Aspect 46. A heterodimeric T-cell modulatory polypeptide of aspect 45, wherein:
[0485] a1) the first polypeptide comprises, in order from N-terminus to C-terminus:
   [0486] i) the KRAS peptide; and
   [0487] ii) a β2-microglobulin polypeptide; and
[0488] b1) the second polypeptide comprises, in order from N-terminus to C-terminus:
   [0489] i) at least one immunomodulatory polypeptide;
   [0490] ii) an MHC class I heavy chain polypeptide; and
   [0491] iii) an Ig Fc polypeptide; or
[0492] a3) the first polypeptide comprises, in order from N-terminus to C-terminus:
   [0493] i) the KRAS peptide; and
   [0494] ii) a β2-microglobulin polypeptide; and
[0495] b3) the second polypeptide comprises, in order from N-terminus to C-terminus:
   [0496] i) an MHC class I heavy chain polypeptide; and
   [0497] ii) an Ig Fc polypeptide; and
   [0498] iii) at least one immunomodulatory polypeptide; and

[0499] wherein the Ig Fc polypeptide is a human IgG1 Fc polypeptide that substantially does not induce cell lysis, optionally comprising the amino acid sequence of FIG. 3G,

[0500] wherein the β2-microglobulin polypeptide is joined to the KRAS peptide by a first linker that comprises the sequence CGGGS(GGGGS)n (SEQ ID NO:142) or GCGGS(GGGGS)n (SEQ ID NO:140), where n is an integer from 1-10, e.g., 2 or 3,

[0501] wherein the MHC heavy chain polypeptide comprises a Cys at residue 84 and a Cys at residue 236,

[0502] wherein the β2M polypeptide comprises a Cys at residue 12,

[0503] wherein the Cys at amino acid residue 12 of the β2M polypeptide is disulfide bonded to a Cys at amino acid residue 236 of the MHC heavy chain polypeptide,

[0504] wherein a disulfide bond links the Cys in the linker with a Cys substituted for Tyr84 of the MHC heavy chain polypeptide,

[0505] wherein the MHC heavy chain polypeptide comprises an amino acid sequence having at least 95% amino acid sequence identity to an HLA-A polypeptide selected from the group consisting of an HLA-A*0201 polypeptide, an HLA-A*1101 polypeptide, an HLA-A*3303 polypeptide, and an HLA-A*2401 polypeptide,

[0506] wherein the at least one immunomodulatory polypeptide is a variant of IL-2 that comprises i) an H16A substitution and an F42A substitution; or ii) an H16T substitution and an F42A substitution, and

[0507] wherein the polypeptide comprises two immunomodulatory polypeptides that are the same, are in tandem, and comprise a variant of IL-2 that comprises i) an H16A substitution and an F42A substitution; or ii) an H16T substitution and an F42A substitution.

[0508] Aspect 47. A heterodimeric T-cell modulatory polypeptide of aspect 46, wherein the KRAS peptide has the amino acid sequence VVGADGVGK (SEQ ID NO:176), VVGACGVGK (SEQ ID NO:177), or VVGAVGVGK (SEQ ID NO:178), and has a length of 9 amino acids.

[0509] Aspect 48. A heterodimeric T-cell modulatory polypeptide of aspect 46, wherein the KRAS peptide has the amino acid sequence VVVGADGVGK (SEQ ID NO:179), VVVGACGVGK (SEQ ID NO:181), or VVVGAVGVGK (SEQ ID NO:180), and has a length of 10 amino acids.

[0510] Aspect 49 A heterodimeric T-cell modulatory polypeptide of aspect 46, wherein the KRAS peptide has the amino acid sequence VTGADGVGK (SEQ ID NO:182), VTGACGVGK (SEQ ID NO:184), or VTGAVGVGK (SEQ ID NO:183), and has a length of 9 amino acids.

[0511] Aspect 50. A heterodimeric T-cell modulatory polypeptide of aspect 46, wherein the KRAS peptide has the amino acid sequence VTVGADGVGK (SEQ ID NO:185), VTVGACGVGK (SEQ ID NO:187), or VTVGAVGVGK (SEQ ID NO:186), and has a length of 10 amino acids.

[0512] Aspect 51. A heterodimeric T-cell modulatory polypeptide of aspect 46, wherein the KRAS peptide is KLVVVGADGV (SEQ ID NO:195) and the MHC heavy chain polypeptide comprises an amino acid sequence having at least 95% amino acid sequence identity to an HLA-A*0201 polypeptide.

[0513] Aspect 52. A heterodimeric T-cell modulatory polypeptide of aspect 46, wherein the KRAS peptide is VVVGADGVGK (SEQ ID NO:179) and the MHC heavy chain polypeptide comprises an amino acid sequence having at least 95% amino acid sequence identity to an HLA-A11*01 polypeptide.

[0514] Aspect 53. A heterodimeric T-cell modulatory polypeptide of aspect 46, wherein the KRAS peptide is VVGAVGVGK (SEQ ID NO: 178) and the MHC heavy chain polypeptide comprises an amino acid sequence having at least 95% amino acid sequence identity to an HLA-A11*01 polypeptide.

[0515] Aspect 54. A single chain T-cell modulatory polypeptide according to any one of aspects 1-43, comprising:
[0516] i) a KRAS peptide comprising a KRAS epitope expressed on a cancer cell, wherein the KRAS peptide has a length of at least 4 amino acids;
[0517] ii) a β2-microglobulin polypeptide;
[0518] iii) an MHC class I heavy chain polypeptide, and
[0519] iv) at least one immunomodulatory polypeptide.

[0520] Aspect 55. A single chain T-cell modulatory polypeptide of aspect 54, comprising in order from N-terminus to C-terminus:

[0521] A) i) a KRAS peptide; ii) a β2M polypeptide; iii) a class I MHC heavy chain polypeptide; iv) one or more immunomodulatory polypeptides; and v) an Ig Fc polypeptide; or

[0522] B) i) a KRAS peptide; ii) a β2M polypeptide; iii) a class I MHC heavy chain polypeptide; iv) an Ig Fc polypeptide; and v) one or more immunomodulatory polypeptides; or

[0523] C) i) one or more immunomodulatory polypeptides; ii) a KRAS peptide; iii) a β2M polypeptide; iv) a class I MHC heavy chain polypeptide; and v) an Ig Fc polypeptide.

[0524] Aspect 56. A single chain T-cell modulatory polypeptide of aspect 55, comprising in order from N-terminus to C-terminus:
[0525] i) a KRAS peptide; ii) a β2M polypeptide; iii) a class I MHC heavy chain polypeptide; iv) an Ig Fc polypeptide; and v) one or more immunomodulatory polypeptides, wherein the Ig Fc polypeptide is a human IgG1 Fc polypeptide that substantially does not induce cell lysis, optionally comprising the amino acid sequence of FIG. 3G,

[0526] wherein the β2-microglobulin polypeptide is joined to the KRAS peptide by a first linker that comprises the sequence CGGGS(GGGGS)n (SEQ ID NO:142) or GCGGS(GGGGS)n (SEQ ID NO:140), where n is an integer from 1-10, e.g., 2 or 3,

[0527] wherein the MHC heavy chain polypeptide comprises a Cys at residue 84 and a Cys at residue 236,

[0528] wherein the β2M polypeptide comprises a Cys at residue 12,

[0529] wherein the Cys at amino acid residue 12 of the β2M polypeptide is disulfide bonded to a Cys at amino acid residue 236 of the MHC heavy chain polypeptide,

[0530] wherein a disulfide bond links the Cys in the linker with a Cys substituted for Tyr84 of the MHC heavy chain polypeptide,

[0531] wherein the MHC heavy chain polypeptide comprises an amino acid sequence having at least 95% amino acid sequence identity to an HLA-A polypeptide selected from the group consisting of an HLA-A*0201 polypeptide, an HLA-A*1101 polypeptide, an HLA-A*3303 polypeptide, and an HLA-A*2401 polypeptide,

[0532] wherein the B2M polypeptide is connected to the MHC heavy chain polypeptide by a (GGGGS)n (SEQ ID NO:377) linker, where n is 1, 2, 3, 4, 5, 6, 7, 8, 9, or 10, e.g., with n=3 or 7,

[0533] wherein the at least one immunomodulatory polypeptide is a variant of IL-2 that comprises i) an H16A substitution and an F42A substitution; or ii) an H16T substitution and an F42A substitution, and

[0534] wherein the polypeptide comprises two immunomodulatory polypeptides that are the same, are in tandem, and comprise a variant of IL-2 that comprises i) an H16A substitution and an F42A substitution; or ii) an H16T substitution and an F42A substitution.

[0535] Aspect 57. A heterodimeric T-cell modulatory polypeptide of aspect 56, wherein the KRAS peptide has the amino acid sequence VVGADGVGK (SEQ ID NO:176), VVGACGVGK (SEQ ID NO:177), or VVGAVGVGK (SEQ ID NO:178), and has a length of 9 amino acids.

[0536] Aspect 58. A heterodimeric T-cell modulatory polypeptide of aspect 56, wherein the KRAS peptide has the amino acid sequence VVVGADGVGK (SEQ ID NO:179), VVVGACGVGK (SEQ ID NO:181), or VVVGAVGVGK (SEQ ID NO:180), and has a length of 10 amino acids.

[0537] Aspect 59 A heterodimeric T-cell modulatory polypeptide of aspect 56, wherein the KRAS peptide has the amino acid sequence VTGADGVGK (SEQ ID NO:182), VTGACGVGK (SEQ ID NO:184), or VTGAVGVGK (SEQ ID NO:183), and has a length of 9 amino acids.

[0538] Aspect 60. A heterodimeric T-cell modulatory polypeptide of aspect 56, wherein the KRAS peptide has the amino acid sequence VTVGADGVGK (SEQ ID NO:185), VTVGACGVGK (SEQ ID NO:187), or VTVGAVGVGK (SEQ ID NO:186), and has a length of 10 amino acids.

[0539] Aspect 61. A heterodimeric T-cell modulatory polypeptide of aspect 56, wherein the KRAS peptide is KLVVVGADGV (SEQ ID NO:195) and the MHC heavy chain polypeptide comprises an amino acid sequence having at least 95% amino acid sequence identity to an HLA-A*0201 polypeptide.

[0540] Aspect 62. A heterodimeric T-cell modulatory polypeptide of aspect 56, wherein the KRAS peptide is VVVGADGVGK (SEQ ID NO:179) and the MHC heavy chain polypeptide comprises an amino acid sequence having at least 95% amino acid sequence identity to an HLA-A11*01 polypeptide.

[0541] Aspect 63. A heterodimeric T-cell modulatory polypeptide of aspect 56, wherein the KRAS peptide is VVGAVGVGK (SEQ ID NO: 178) and the MHC heavy chain polypeptide comprises an amino acid sequence having at least 95% amino acid sequence identity to an HLA-A11*01 polypeptide.

[0542] Aspect 64. A T-cell modulatory polypeptide, wherein the TMP is a homodimer comprising a first and second heterodimer of any one of aspects 44-53, wherein the first and second heterodimers are the same and are covalently bound by one or more disulfide bonds between the Ig Fc polypeptides of the first and second heterodimers.

[0543] Aspect 65. A T-cell modulatory polypeptide, wherein the TMP is a homodimer comprising a first and second single-chain TMP of any one of aspects 54-63,

[0544] wherein the first and second single-chain TMPs are the same and are covalently bound by one or more disulfide bonds between the Ig Fc polypeptides of the first and second TMPs.

[0545] Aspect 66. A nucleic acid comprising a nucleotide sequence encoding a first or second polypeptide of any one of aspects 44-53.

[0546] Aspect 67. A nucleic acid comprising a nucleotide sequence encoding a single-chain TMP of any one of aspects 54-63.

[0547] Aspect 68. An expression vector comprising a nucleic acid of aspect 66 or 67.

[0548] Aspect 69. A method of selectively modulating the activity of T cell specific for a KRAS peptide epitope, the method comprising contacting the T cell with a T-cell modulatory polypeptide according to any one of aspects 1-65, wherein said contacting selectively modulates the activity of the epitope-specific T cell.

[0549] Aspect 70. A method of treating a KRAS-associated cancer in a patient having the cancer, the method comprising administering to the patient an effective amount of a pharmaceutical composition comprising T-cell modulatory polypeptide according to any one of aspects 1-65.

[0550] Aspect 71. The method of aspect 70, wherein the cancer is non-small cell lung cancer, lung adenocarcinoma, mucinous adenoma, ductal carcinoma of the pancreas, colorectal cancer, or leukemia.

[0551] Aspect 72. The method of aspect 70 or 71, wherein said administering is intravenous.

[0552] Aspect 73. The method of any one of aspects 70-72, further comprising co-administering an immune checkpoint inhibitor to the patient.

[0553] Aspect 74. The method of aspect 73, wherein the immune checkpoint inhibitor is an antibody specific for PD-L1, PD-1, or CTLA4.

[0554] Aspect 75. The method of any one of aspects 70-74, further comprising administering a KRAS(G12C) inhibitor.

[0555] Aspect 76. A method of modulating an immune response in an individual, the method comprising administering to the individual an effective amount of the T-cell modulatory polypeptide of any one of aspects 1-65, wherein said administering induces an epitope-specific T cell response and an epitope-non-specific T cell response, wherein the ratio of the epitope-specific T cell response to the epitope-non-specific T cell response is at least 2:1.

[0556] Aspect 77. A method of delivering an immunomodulatory polypeptide selectively to a target T cell, the method comprising contacting a mixed population of T cells with a T-cell modulatory polypeptide of any one of aspects 1-65, wherein the mixed population of T cells comprises the target T cell and non-target T cells, wherein the target T cell is specific for the KRAS epitope present within the T-cell modulatory polypeptide, and wherein said contacting delivers the one or more immunomodulatory polypeptides present within the T-cell modulatory polypeptide to the target T cell.

[0557] Aspect 78. A method of detecting, in a mixed population of T cells obtained from an individual, the presence of a target T cell that binds a KRAS peptide comprising a cancer-associated mutation, the method comprising: a) contacting in vitro the mixed population of T cells with the T-cell modulatory polypeptide of any one of aspects 1-65, wherein the T-cell modulatory polypeptide comprises the peptide epitope; and b) detecting activation and/or proliferation of T cells in response to said contacting, wherein activated and/or proliferated T cells indicates the presence of the target T cell.

[0558] Aspect 79. A method of detecting the presence of KRAS-specific T cells, comprising the steps of
[0559] A) contacting a KRAS-specific T cell with an antigen presenting polypeptide (APP) comprising:
   [0560] i) a KRAS peptide comprising a KRAS epitope specific for the TCR on KRAS-specific T cell;
   [0561] ii) first major histocompatibility complex (MHC) polypeptide;
   [0562] iii) a second MHC polypeptide, and
   [0563] iv) a detectable label, and
[0564] B) detecting the presence of the label.

[0565] Aspect 80. A method of aspect 79, wherein the step of contacting is carried out in vivo.

[0566] Aspect 81. A method of aspect 79, wherein the step of contacting is carried out in vitro.

[0567] Aspect 82. A method according to any one of aspects 79-81, wherein the APP is a heterodimer comprising a first and second polypeptide, and wherein:
[0568] a1) the first polypeptide comprises, in order from N-terminus to C-terminus:
   [0569] i) the KRAS peptide; and
   [0570] ii) a β2-microglobulin polypeptide; and
[0571] b1) the second polypeptide comprises, in order from N-terminus to C-terminus:
   [0572] i) an MHC class I heavy chain polypeptide; and
   [0573] ii) an Ig Fc polypeptide; or
[0574] a3) the first polypeptide comprises, in order from N-terminus to C-terminus:
   [0575] i) the KRAS peptide; and
   [0576] ii) a β2-microglobulin polypeptide; and
[0577] b3) the second polypeptide comprises, in order from N-terminus to C-terminus:
   [0578] i) an MHC class I heavy chain polypeptide; and
   [0579] ii) an Ig Fc polypeptide, wherein the Ig Fc polypeptide is a human IgG1 Fc polypeptide that substantially does not induce cell lysis, optionally comprising the amino acid sequence of FIG. 3G.

[0580] Aspect 83. A method according to aspects 82,

[0581] wherein the β2-microglobulin polypeptide is joined to the KRAS peptide by a first linker that comprises the sequence CGGGS(GGGGS)n (SEQ ID NO:142) or GCGGS(GGGGS)n (SEQ ID NO:140), where n is an integer from 1-10, e.g., 2 or 3,

[0582] wherein the MHC heavy chain polypeptide comprises a Cys at residue 84 and a Cys at residue 236,

[0583] wherein the β2M polypeptide comprises a Cys at residue 12,

[0584] wherein the Cys at amino acid residue 12 of the β2M polypeptide is disulfide bonded to a Cys at amino acid residue 236 of the MHC heavy chain polypeptide,

[0585] wherein a disulfide bond links the Cys in the linker with a Cys substituted for Tyr84 of the MHC heavy chain polypeptide, and

[0586] wherein the MHC heavy chain polypeptide comprises an amino acid sequence having at least 95% amino acid sequence identity to an HLA-A polypeptide selected from the group consisting of an HLA-A*0201 polypeptide, an HLA-A*1101 polypeptide, an HLA-A*3303 polypeptide, and an HLA-A*2401 polypeptide.

[0587] Aspect 84. A method according to any one of aspects 79-81, wherein the APP is a single chain polypeptide comprising:
[0588] i) a KRAS peptide;
[0589] ii) a β2-microglobulin polypeptide; and
[0590] iii) an MHC class I heavy chain polypeptide.

[0591] Aspect 85. A method according to aspect 84, wherein the single chain APP comprises in order from N-terminus to C-terminus: A) i) a KRAS peptide; ii) a β2M polypeptide; iii) a class I MHC heavy chain polypeptide; and iv) an Ig Fc polypeptide,

[0592] wherein the Ig Fc polypeptide is a human IgG1 Fc polypeptide that substantially does not induce cell lysis, optionally comprising the amino acid sequence of FIG. 3G.

[0593] Aspect 86. A method according to aspect 85,

[0594] wherein the β2-microglobulin polypeptide is joined to the KRAS peptide by a first linker that comprises the sequence CGGGS(GGGGS)n (SEQ ID NO:142) or GCGGS(GGGGS)n (SEQ ID NO:140), where n is an integer from 1-10, e.g., 2 or 3,

[0595] wherein the MHC heavy chain polypeptide comprises a Cys at residue 84 and a Cys at residue 236,

[0596] wherein the β2M polypeptide comprises a Cys at residue 12,

[0597] wherein the Cys at amino acid residue 12 of the β2M polypeptide is disulfide bonded to a Cys at amino acid residue 236 of the MHC heavy chain polypeptide,

[0598] wherein a disulfide bond links the Cys in the linker with a Cys substituted for Tyr84 of the MHC heavy chain polypeptide, and

[0599] wherein the MHC heavy chain polypeptide comprises an amino acid sequence having at least 95% amino acid sequence identity to an HLA-A polypeptide selected from the group consisting of an HLA-A*0201 polypeptide, an HLA-A*1101 polypeptide, an HLA-A*3303 polypeptide, and an HLA-A*2401 polypeptide.

### EXAMPLES

[0600] The following examples are put forth so as to provide those of ordinary skill in the art with a complete disclosure and description of how to make and use the present disclosure, and are not intended to limit the scope of what the inventors regard as their invention nor are they intended to represent that the experiments below are all or the only experiments performed. Efforts have been made to ensure accuracy with respect to numbers used (e.g. amounts, temperature, etc.) but some experimental errors and deviations should be accounted for. Unless indicated otherwise, parts are parts by weight, molecular weight is weight average molecular weight, temperature is in degrees Celsius, and pressure is at or near atmospheric. Standard abbreviations may be used, e.g., bp, base pair(s); kb, kilobase(s); pl, picoliter(s); s or sec, second(s); min, minute(s); h or hr, hour(s); aa, amino acid(s); kb, kilobase(s); bp, base pair(s); nt, nucleotide(s); i.m., intramuscular(ly); i.p., intraperitoneal(ly); s.c., subcutaneous(ly); and the like.

### Example 1: Generation of Kras G12V-Specific HLA-A11⁺ T Cells and Assessment of their Expansion in Response to Kras G12V HLA-A11 TMPS

[0601] T-cell receptor (TCR)-transduced primary human T cells were generated from HLA-A11+ donors. The TCRs were responsive to KRAS G12V (7-16) peptide. The ability of TMPs comprising KRAS G12V (7-16) and HLA-A11 to expand KRAS G12V (7-16)-specific, TCR-transduced, CD8⁺ T cells was assessed.

[0602] Materials and Methods

[0603] The following TMPs were used: (i) TMP 4074 (single chain; comprising G12V (7-16) as the peptide epitope); (ii) TMP 4073 (single chain; comprising G12D (7-16) as the peptide epitope); (iii) TMP 4072-4030 (split chain comprising heterodimers of construct 4072 and construct 4030; and comprising G12V (7-16) as the peptide epitope); and (iv) TMP 4072-4029 (split chain comprising heterodimers of construct 4072 and construct 4029; and comprising G12D (7-16) as the peptide epitope). The TMPs included an HLA-A*11:01 allele heavy chain; a β2M polypeptide; KRAS G12V (7-16) or KRAS G12D (7-16) as the peptide epitope; affinity-attenuated IL-2 variant (IL-2 (H16A; F42A)); and a human immunoglobulin G1 (IgG1) fragment crystallizable (Fc) polypeptide.

[0604] The G12D (7-16) peptide epitope has the amino acid sequence: VVVGADGVGK (SEQ ID NO:179). The G12V (7-16) peptide epitope has the amino acid sequence: VVVGAVGVGK (SEQ ID NO:180).

[0605] The 4072-4029 TMP is a homodimer of two heterodimers, each heterodimer comprising: a) the 4029 polypeptide (FIG. 14K), a “light chain” polypeptide which includes: i) the G12D (7-16) peptide; ii) a GCGGS(GGGS)2) (SEQ ID NO:584) linker; and iii) a β2M polypeptide comprising an R12C substitution; and b) the 4072 polypeptide (FIG. 13L), a “heavy chain” polypeptide which includes: i) an HLA-A*11:01 allele heavy chain with Y84C and A236C substitutions; ii) an IgG1 Fc polypeptide with L234A and L235A substitutions; and iii) two copies of IL2 (H16A; F42A). The heavy and light chain polypeptides are joined by 2 disulfide bonds formed between: i) the Cys in the GCGGS(GGGGS)2 (SEQ ID NO:585) linker and the Cys formed by the Y84C substitution in the HLA-A*11.01 heavy chain polypeptide; and ii) the Cys formed by the R12C substitution in the β2M polypeptide and the Cys formed by the A236C substitution in the HLA-A*11.01 heavy chain polypeptide. The 4072-4029 TMP is a homodimer of two copies of the heterodimer, joined by disulfide bonds formed between the respective IgG1 Fc regions. The 4072-4029 TMP is referred to in FIG. 20 as “split-chain G12D TMP.”

[0606] The 4072-4030 TMP is a homodimer of two heterodimers, each heterodimer comprising: a) the 4030 polypeptide (FIG. 14Q), which includes: i) the G12V (7-16) peptide; ii) a GCGGS(GGGS)2) (SEQ ID NO:584) linker; and iii) a β2M polypeptide comprising an R12C substitution; and b) the 4072 polypeptide (FIG. 13L), a “heavy chain” polypeptide which includes: i) an HLA-A*11:01 allele heavy chain with Y84C and A236C substitutions; ii) an IgG1 Fc polypeptide with L234A and L235A substitutions; and iii) two copies of IL2 (H16A; F42A). The heavy and light chain polypeptides are joined by 2 disulfide bonds formed between: i) the Cys in the GCGGS(GGGGS)2 (SEQ ID NO:585) linker and the Cys formed by the Y84C substitution in the HLA-A*11.01 heavy chain polypeptide; and ii) the Cys formed by the R12C substitution in the β2M polypeptide and the Cys formed by the A236C substitution in the HLA-A*11.01 heavy chain polypeptide. The 4072-4030 TMP is a homodimer of two copies of the heterodimer, joined by disulfide bonds formed between the respective IgG1 Fc regions. The 4072-4030 TMP is referred to in FIG. 20 as “split-chain G12V TMP.”

[0607] The 4073 TMP is a homodimer of two single-chain polypeptides, each single-chain polypeptide (depicted in FIG. 19B) comprising: i) the G12D (7-16) peptide; ii) a GCGGS(GGGGS)2 (SEQ ID NO:585) linker; iii) a β2M (R12C) polypeptide; iv) an HLA-A*11:01 allele heavy chain with Y84C and A236C substitutions; v) an IgG1 Fc polypeptide with L234A and L235A substitutions; and vi) two copies of IL2 (H16A; F42A). Each of the two single-chain polypeptides can include intrachain disulfide bonds formed between: i) the Cys in the GCGGS(GGGGS)2 (SEQ ID NO:585) linker and the Cys formed by the Y84C substitution in the HLA-A*11.01 heavy chain polypeptide; and ii) the Cys formed by the R12C substitution in the β2M polypeptide and the Cys formed by the A236C substitution in the HLA-A*11.01 heavy chain polypeptide. The two single-chain polypeptides are disulfide bonded to one another via disulfide bonds formed between the IgG1 Fc polypeptide in the respective single-chain polypeptides. The 4073 TMP is referred to in FIG. 20 as “single-chain G12D TMP.”

[0608] The 4074 TMP is a homodimer of two single-chain polypeptides, each single-chain polypeptide (depicted in FIG. 19C) comprising: i) the G12V (7-16) peptide; ii) a GCGGS(GGGGS)2 (SEQ ID NO:585) linker; iii) a β2M (R12C) polypeptide; iv) an HLA-A*11:01 allele heavy chain with Y84C and A236C substitutions; v) an IgG1 Fc polypeptide with L234A and L235A substitutions; and vi) two copies of IL2 (H16A; F42A). Each of the two single-chain polypeptides can include intrachain disulfide bonds formed between: i) the Cys in the GCGGS(GGGGS)2 (SEQ ID NO:585) linker and the Cys formed by the Y84C substitution in the HLA-A*11.01 heavy chain polypeptide; and ii) the Cys formed by the R12C substitution in the β2M polypeptide and the Cys formed by the A236C substitution in the HLA-A*11.01 heavy chain polypeptide. The two single-chain polypeptides are disulfide bonded to one another via disulfide bonds formed between the IgG1 Fc polypeptide in the respective single-chain polypeptides. The 4074 TMP is referred to in FIG. 20 as “single-chain G12V TMP.”

[0609] HLA-A11⁺ human healthy donor CD8⁺ T cells were transduced with a TCR specific for KRAS G12V (7-16). Transduced CD8⁺ T cells were stimulated with TMPs containing KRAS G12V (7-16) as the peptide epitope, or containing KRAS G12D (7-16) as the peptide epitope, in the presence of autologous peripheral blood mononuclear cells (PBMCs) as feeders. Expansion of the TCR-transduced T cells was monitored using antibodies specific for the mouse constant region of the TCR (engineered into the TCR) and assessed by flow cytometry.

[0610] Results

[0611] As depicted in FIG. 20, KRAS G12V (7-16) HLA-A11 TMPs can expand KRAS G12V(7-16)-specific CD8⁺ T cells in a dose-dependent manner, both as a percent of CD8⁺ T cells (upper panel) and as the total number of antigen-specific cells (lower panel), in 10-day in vitro assays. The effect was epitope specific, as control TMPs comprising KRAS G12D (7-16) did not induce expansion in a dose-dependent manner.

[0612] While the present invention has been described with reference to the specific embodiments thereof, it should be understood by those skilled in the art that various changes may be made and equivalents may be substituted without departing from the true spirit and scope of the invention. In addition, many modifications may be made to adapt a particular situation, material, composition of matter, process, process step or steps, to the objective, spirit and scope of the present invention. All such modifications are intended to be within the scope of the claims appended hereto.

The application's sequence listing, which the Patent Office published only in electronic form, follows.

SEQUENCE LISTING (602 sequences)

SEQ ID NO: 1 - protein, 188 aa, Homo sapiens [sequence omitted]

SEQ ID NO: 2 - protein, 189 aa, Homo sapiens [sequence omitted]

SEQ ID NO: 3 - protein, 268 aa, Homo sapiens
PGWFLDSPDRPWNPPTFSPALLVVTEGDNATFTCSFSNTSESFVLNWYRMSPSNQTDKLAAFPEDRSQPGQDCRFRVTQLPNGRDFHMSVVRARRNDSGTYLCGAISLAPKAQIKESLRAELRVTERRAEVPTAHPSPSPRPAGQFQTLVVGVVGGLLGSLVLLVWVLAVICSRAARGTIGARRTGQPLKEDPSAVPVFSVDYGELDFQWREKTPEPPVPCVPEQTEYATIVFPSGMGTSSPARRGSADGPRSAQPLRPEDGHCSWPL

SEQ ID NO: 4 - protein, 208 aa, Homo sapiens [sequence omitted]

SEQ ID NO: 5 - protein, 220 aa, Homo sapiens
MLRLLLALNLFPSIQVTGNKILVKQSPMLVAYDNAVNLSCKYSYNLFSREFRASLHKGLDSAVEVCVVYGNYSQQLQVYSKTGFNCDGKLGNESVTFYLQNLYVNQTDIYFCKIEVMYPPPYLDNEKSNGTIIHVKGKHLCPSPLFPGPSKPFWVLVVVGGVLACYSLLVTVAFIIFWVRSKRSRLLHSDYMNMTPRRPGPTRKHYQPYAPPRDFAAYRS

SEQ ID NO: 6 - protein, 123 aa, Homo sapiens
MLRLLLALNLFPSIQVTGNKILVKQSPMLVAYDNAVNLSWKHLCPSPLFPGPSKPFWVLVVVGGVLACYSLLVTVAFIIFWVRSKRSRLLHSDYMNMTPRRPGPTRKHYQPYAPPRDFAAYRS

SEQ ID NO: 7 - protein, 101 aa, Homo sapiens
MLRLLLALNLFPSIQVTGKHLCPSPLFPGPSKPFWVLVVVGGVLACYSLLVTVAFIIFWVRSKRSRLLHSDYMNMTPRRPGPTRKHYQPYAPPRDFAAYRS

SEQ ID NO: 8 - protein, 224 aa, Homo sapiens
APLKIQAYFNETADLPCQFANSQNQSLSELVVFWQDQENLVLNEVYLGKEKFDSVHSKYMNRTSFDSDSWTLRLHNLQIKDKGLYQCIIHHKKPTGMIRIHQMNSELSVLANFSQPEIVPISNITENVYINLTCSSIHGYPEPKKMSVLLRTKNSTIEYDGIMQKSQDNVTELYDVSISLSVSFPDVTSNMTIFCILETDKTRLLSSPFSIELEDPQPPPDHIP

SEQ ID NO: 9 - protein, 110 aa, Homo sapiens
APLKIQAYFNETADLPCQFANSQNQSLSELVVFWQDQENLVLNEVYLGKEKFDSVHSKYMNRTSFDSDSWTLRLHNLQIKDKGLYQCIIHHKKPTGMIRIHQMNSELSVL

SEQ ID NO: 10 - protein, 254 aa, Homo sapiens
MEYASDASLDPEAPWPPAPRARACRVLPWALVAGLLLLLLLAAACAVFLACPWAVSGARASPGSAASPRLREGPELSPDDPAGLLDLRQGMFAQLVAQNVLLIDGPLSWYSDPGLAGVSLTGGLSYKEDTKELVVAKAGVYYVFFQLELRRVVAGEGSGSVSLALHLQPLRSAAGAAALALTVDLPPASSEARNSAFGFQGRLLHLSAGQRLGVHLHTEARARHAWQLTQGATVLGLFRVTPEIPAGLPSPRSE

SEQ ID NO: 11 - protein, 174 aa, Homo sapiens
PAGLLDLRQGMFAQLVAQNVLLIDGPLSWYSDPGLAGVSLTGGLSYKEDTKELVVAKAGVYYVFFQLELRRVVAGEGSGSVSLALHLQPLRSAAGAAALALTVDLPPASSEARNSAFGFQGRLLHLSAGQRLGVHLHTEARARHAWQLTQGATVLGLFRVTPEIPAGLPSPRSE

SEQ ID NO: 12 - protein, 175 aa, Homo sapiens
DPAGLLDLRQGMFAQLVAQNVLLIDGPLSWYSDPGLAGVSLTGGLSYKEDTKELVVAKAGVYYVFFQLELRRVVAGEGSGSVSLALHLQPLRSAAGAAALALTVDLPPASSEARNSAFGFQGRLLHLSAGQRLGVHLHTEARARHAWQLTQGATVLGLFRVTPEIPAGLPSPRSE

SEQ ID NO: 13 - protein, 167 aa, Homo sapiens
DPAGLLDLRQGMFAQLVAQNVLLIDGPLSWYSDPGLAGVSLTGGLSYKEDTKELVVAKAGVYYVFFQLELRRVVAGEGSGSVSLALHLQPLRSAAGAAALALTVDLPPASSEARNSAFGFQGRLLHLSAGQRLGVHLHTEARARHAWQLTQGATVLGLFRVTPEIPA

SEQ ID NO: 14 - protein, 255 aa, Homo sapiens
MGNSCYNIVATLLLVLNFERTRSLQDPCSNCPAGTFCDNNRNQICSPCPPNSFSSAGGQRTCDICRQCKGVFRTRKECSSTSNAECDCTPGFHCLGAGCSMCEQDCKQGQELTKKGCKDCCFGTFNDQKRGICRPWTNCSLDGKSVLVNGTKERDVVCGPSPADLSPGASSVTPPAPAREPGHSPQIISFFLALTSTALLFLLFFLTLRFSVVKRGRKKLLYIFKQPFMRPVQTTQEEDGCSCRFPEEEEGGCEL

SEQ ID NO: 15 - protein, 133 aa, Homo sapiens [sequence omitted]

SEQ ID NO: 16 - protein, 251 aa, Homo sapiens
ELCDDDPPEIPHATFKAMAYKEGTMLNCECKRGFRRIKSGSLYMLCTGNSSHSSWDNQCQCTSSATRNTTKQVTPQPEEQKERKTTEMQSPMQPVDQASLPGHCREPPPWENEATERIYHFVVGQMVYYQCVQGYRALHRGPAESVCKMTHGKTRWTQPQLICTGEMETSQFPGEEKPQASPEGRPESETSCLVTTTDFQIQTEMAATMETSIFTTEYQVAVAGCVFLLISVLLLSGLTWQRRQRKSRRTI

SEQ ID NO: 17 - protein, 524 aa, Homo sapiens
VNGTSQFTCFYNSRANISCVWSQDGALQDTSCQVHAWPDRRRWNQTCELLPVSQASWACNLILGAPDSQKLTTVDIVTLRVLCREGVRWRVMAIQDFKPFENLRLMAPISLQVVHVETHRCNISWEISQASHYFERHLEFEARTLSPGHTWEEAPLLTLKQKQEWICLETLTPDTQYEFQVRVKPLQGEFTTWSPWSQPLAFRTKPAALGKDTIPWLGHLLVGLSGAFGFIILVYLLINCRNTGPWLKKVLKCNTPDPSKFFSQLSSEHGGDVQKWLSSPFPSSSFSPGGLAPEISPLEVLERDKVTQLLLQQDKVPEPASLSSNHSLTSCFTNQGYFFFHLPDALEIEACQVYFTYDPYSEEDPDEGVAGAPTGSSPQPLQPLSGEDDAYCTFPSRDDLLLFSPSLLGGPSPPSTAPGGSGAGEERMPPSLQERVPRDWDPQPLGPPTPGVPDLVDFQPPPELVLREAGEEVPDAGPREGVSFPWSRPPGQGEFRALNARLPLNTDAYLSLQELQGQDPTHLV

SEQ ID NO: 18 - protein, 347 aa, Homo sapiens
LNTTILTPNGNEDTTADFFLTTMPTDSLSVSTLPLPEVQCFVFNVEYMNCTWNSSSEPQPTNLTLHYWYKNSDNDKVQKCSHYLFSEEITSGCQLQKKEIHLYQTFVVQLQDPREPRRQATQMLKLQNLVIPWAPENLTLHKLSESQLELNWNNRFLNHCLEHLVQYRTDWDHSWTEQSVDYRHKFSLPSVDGQKRYTFRVRSRFNPLCGSAQHWSEWSHPIHWGSNTSKENPFLFALEAVVISVGSMGLIISLLCVYFWLERTMPRIPTLKNLEDLVTEYHGNFSAWSGVSKGLAESLQPDYSERLCLVSEIPPKGGALGEGPGASPCNQHSPYWAPPCYTLKPET

SEQ ID NO: 19 - protein, 227 aa, Artificial sequence
  synthetic sequence
DKTHTCPPCPAPELLGGPSVFLFPPKPKDTLMISRTPEVTCVVVDVSHEDPEVKFNWYVDGVEVHNAKTKPREEQYNSTYRVVSVLTVLHQDWLNGKEYKCKVSNKALPAPIEKTISKAKGQPREPQVYTLPPSRDELTKNQVSLTCLVKGFYPSDIAVEWESNGQPENNYKTTPPVLDSDGSFFLYSKLTVDKSRWQQGNVFSCSVMHEALHNHYTQKSLSLSPGK

SEQ ID NO: 20 - protein, 325 aa, Artificial sequence
  synthetic sequence
STKGPSVFPLAPCSRSTSESTAALGCLVKDYFPEPVTVSWNSGALTSGVHTFPAVLQSSGLYSLSSVVTVPSSNFGTQTYTCNVDHKPSNTKVDKTVERKCCVECPPCPAPPVAGPSVFLFPPKPKDTLMISRTPEVTCVVVDVSHEDPEVQFNWYVDGVEVHNAKTKPREEQFNSTFRVVSVLTVVHQDWLNGKEYKCKVSNKGLPAPIEKTISKTKGQPREPQVYTLPPSREEMTKNQVSLTCLVKGFYPSDIAVEWESNGQPENNYKTTPPMLDSDGSFFLYSKLTVDKSRWQQGNVFSCSVMHEALHNHYTQKSLSLSPGK

SEQ ID NO: 21 - protein, 246 aa, Artificial sequence
  synthetic sequence
HKPSNTKVDKRVELKTPLGDTTHTCPPCPAPELLGGPSVFLFPPKPKDTLMISRTPEVTCVVVDVSHEDPEVKFNWYVDGVEVHNAKTKPREEQYNSTYRVVSVLTVLHQDWLNGKEYKCKVSNKALPAPIEKTISKAKGQPREPQVYTLPPSRDELTKNQVSLTCLVKGFYPSDIAVEWESNGQPENNYKTTPPVLDSDGSFFLYSKLTVDKSRWQQGNVFSCSVMHEALHNHYTQKSLSLSPGK

SEQ ID NO: 22 - protein, 383 aa, Artificial sequence
  synthetic sequence
PTKAPDVFPIISGCRHPKDNSPVVLACLITGYHPTSVTVTWYMGTQSQPQRTFPEIQRRDSYYMTSSQLSTPLQQWRQGEYKCVVQHTASKSKKEIFRWPESPKAQASSVPTAQPQAEGSLAKATTAPATTRNTGRGGEEKKKEKEKEEQEERETKTPECPSHTQPLGVYLLTPAVQDLWLRDKATFTCFVVGSDLKDAHLTWEVAGKVPTGGVEEGLLERHSNGSQSQHSRLTLPRSLWNAGTSVTCTLNHPSLPPQRLMALREPAAQAPVKLSLNLLASSDPPEAASWLLCEVSGFSPPNILLMWLEDQREVNTSGFAPARPPPQPRSTTFWAWSVLRVPAPPSPQPATYTCVVSHEDSRTLLNASRSLEVSYVTDHGPMK

SEQ ID NO: 23 - protein, 276 aa, Artificial sequence
  synthetic sequence
VTSTLTIKZSDWLGESMFTCRVDHRGLTFQQNASSMCVPDQDTAIRVFAIPPSFASIFLTKSTKLTCLVTDLTTYBSVTISWTREENGAVKTHTNISESHPNATFSAVGEASICEDBDWSGERFTCTVTHTDLPSPLKQTISRPKGVALHRPBVYLLPPARZZLNLRESATITCLVTGFSPADVFVEWMQRGEPLSPQKYVTSAPMPEPQAPGRYFAHSILTVSEEEWNTGGTYTCVVAHEALPNRVTERTVDKSTGKPTLYNVSLVMSDTAGTCY

SEQ ID NO: 24 - protein, 353 aa, Artificial sequence
  synthetic sequence
ASPTSPKVFPLSLCSTQPDGNVVIACLVQGFFPQEPLSVTWSESGQGVTARNFPPSQDASGDLYTTSSQLTLPATQCLAGKSVTCHVKHYTNPSQDVTVPCPVPSTPPTPSPSTPPTPSPSCCHPRLSLHRPALEDLLLGSEANLTCTLTGLRDASGVTFTWTPSSGKSAVQGPPERDLCGCYSVSSVLPGCAEPWNHGKTFTCTAAYPESKTPLTATLSKSGNTFRPEVHLLPPPSEELALNELVTLTCLARGFSPKDVLVRWLQGSQELPREKYLTWASRQEPSQGTTTFAVTSILRVAAEDWKKGDTFSCMVGHEALPLAFTQKTIDRLAGKPTHVNVSVVMAEVDGTCY

SEQ ID NO: 25 - protein, 222 aa, Artificial sequence
  synthetic sequence
ADPCDSNPRGVSAYLSRPSPFDLFIRKSPTITCLVVDLAPSKGTVNLTWSRASGKPVNHSTRKEEKQRNGTLTVTSTLPVGTRDWIEGETYQCRVTHPHLPRALMRSTTKTSGPRAAPEVYAFATPEWPGSRDKRTLACLIQNFMPEDISVQWLHNEVQLPDARHSTTQPRKTKGSGFFVFSRLEVTRAEWEQKDEFICRAVHEAASPSQTVQRAVSVNPGK

SEQ ID NO: 26 - protein, 327 aa, Artificial sequence
  synthetic sequence
ASTKGPSVFPLAPCSRSTSESTAALGCLVKDYFPEPVTVSWNSGALTSGVHTFPAVLQSSGLYSLSSVVTVPSSSLGTKTYTCNVDHKPSNTKVDKRVESKYGPPCPSCPAPEFLGGPSVFLFPPKPKDTLMISRTPEVTCVVVDVSQEDPEVQFNWYVDGVEVHNAKTKPREEQFNSTYRVVSVLTVLHQDWLNGKEYKCKVSNKGLPSSIEKTISKAKGQPREPQVYTLPPSQEEMTKNQVSLTCLVKGFYPSDIAVEWESNGQPENNYKTTPPVLDSDGSFFLYSRLTVDKSRWQEGNVFSCSVMHEALHNHYTQKSLSLSLGK

SEQ ID NO: 27 - protein, 227 aa, Artificial sequence
  synthetic sequence
DKTHTCPPCPAPELLGGPSVFLFPPKPKDTLMISRTPEVTCVVVDVSHEDPEVKFNWYVDGVEVHNAKTKPREEQYNSTYRVVSVLTVLHQDWLNGKEYKCKVSNKALPAPIEKTISKAKGQPREPQVYTLPPSREEMTKNQVSLTCLVKGFYPSDIAVEWESNGQPENNYKTTPPVLDSDGSFFLYSKLTVDKSRWQQGNVFSCSVMHEALHNHYTQKSLSLSPGK

SEQ ID NO: 28 - protein, 227 aa, Artificial sequence
  synthetic sequence
DKTHTCPPCPAPEFEGGPSVFLFPPKPKDTLMISRTPEVTCVVVDVSHEDPEVKFNWYVDGVEVHNAKTKPREEQYNSTYRVVSVLTVLHQDWLNGKEYKCKVSNKALPASIEKTISKAKGQPREPQVYTLPPSREEMTKNQVSLTCLVKGFYPSDIAVEWESNGQPENNYKTTPPVLDSDGSFFLYSKLTVDKSRWQQGNVFSCSVMHEALHNHYTQKSLSLSPGK

SEQ ID NO: 29 - protein, 227 aa, Artificial sequence
  synthetic sequence
DKTHTCPPCPAPELLGGPSVFLFPPKPKDTLMISRTPEVTCVVVDVSHEDPEVKFNWYVDGVEVHNAKTKPREEQYASTYRVVSVLTVLHQDWLNGKEYKCKVSNKALPAPIEKTISKAKGQPREPQVYTLPPSREEMTKNQVSLTCLVKGFYPSDIAVEWESNGQPENNYKTTPPVLDSDGSFFLYSKLTVDKSRWQQGNVFSCSVMHEALHNHYTQKSLSLSPGK

SEQ ID NO: 30 - protein, 227 aa, Artificial sequence
  synthetic sequence
DKTHTCPPCPAPEAAGGPSVFLFPPKPKDTLMISRTPEVTCVVVDVSHEDPEVKFNWYVDGVEVHNAKTKPREEQYNSTYRVVSVLTVLHQDWLNGKEYKCKVSNKALPAPIEKTISKAKGQPREPQVYTLPPSREEMTKNQVSLTCLVKGFYPSDIAVEWESNGQPENNYKTTPPVLDSDGSFFLYSKLTVDKSRWQQGNVFSCSVMHEALHNHYTQKSLSLSPGK

SEQ ID NO: 31 - protein, 119 aa, Homo sapiens
MSRSVALAVLALLSLSGLEAIQRTPKIQVYSRHPAENGKSNFLNCYVSGFHPSDIEVDLLKNGERIEKVEHSDLSFSKDWSFYLLYYTEFTPTEKDEYACRVNHVTLSQPKIVKWDRDM

SEQ ID NO: 32 - protein, 119 aa, Macaca mulatta
MSRSVALAVLALLSLSGLEAIQRTPKIQVYSRHPPENGKPNFLNCYVSGFHPSDIEVDLLKNGEKMGKVEHSDLSFSKDWSFYLLYYTEFTPNEKDEYACRVNHVTLSGPRTVKWDRDM

SEQ ID NO: 33 - protein, 118 aa, Bos Taurus
MARFVALVLLGLLSLSGLDAIQRPPKIQVYSRHPPEDGKPNYLNCYVYGFHPPQIEIDLLKNGEKIKSEQSDLSFSKDWSFYLLSHAEFTPNSKDQYSCRVKHVTLEQPRIVKWDRDL

SEQ ID NO: 34 - protein, 119 aa, Mus musculus
MARSVTLVFLVLVSLTGLYAIQKTPQIQVYSRHPPENGKPNILNCYVTQFHPPHIEIQMLKNGKKIPKVEMSDMSFSKDWSFYILAHTEFTPTETDTYACRVKHASMAEPKTVYWDRDM

SEQ ID NO: 35 - protein, 365 aa, Homo sapiens
MAVMAPRTLLLLLSGALALTQTWAGSHSMRYFFTSVSRPGRGEPRFIAVGYVDDTQFVRFDSDAASQKMEPRAPWIEQEGPEYWDQETRNMKAHSQTDRANLGTLRGYYNQSEDGSHTIQIMYGCDVGPDGRFLRGYRQDAYDGKDYIALNEDLRSWTAADMAAQITKRKWEAVHAAEQRRVYLEGRCVDGLRRYLENGKETLQRTDPPKTHMTHHPISDHEATLRCWALGFYPAEITLTWQRDGEDQTQDTELVETRPAGDGTFQKWAAVVVPSGEEQRYTCHVQHEGLPKPLTLRWELSSQPTIPIVGIIAGLVLLGAVITGAVVAAVMWRRKSSDRKGGSYTQAASSDSAQGSDVSLTACKV

SEQ ID NO: 36 - protein, 365 aa, Homo sapiens
MAVMAPRTLLLLLSGALALTQTWAGSHSMRYFYTSVSRPGRGEPRFIAVGYVDDTQFVRFDSDAASQRMEPRAPWIEQEGPEYWDQETRNVKAQSQTDRVDLGTLRGYYNQSEDGSHTIQIMYGCDVGPDGRFLRGYRQDAYDGKDYIALNEDLRSWTAADMAAQITKRKWEAAHAAEQQRAYLEGRCVEWLRRYLENGKETLQRTDPPKTHMTHHPISDHEATLRCWALGFYPAEITLTWQRDGEDQTQDTELVETRPAGDGTFQKWAAVVVPSGEEQRYTCHVQHEGLPKPLTLRWELSSQPTIPIVGIIAGLVLLGAVITGAVVAAVMWRRKSSDRKGGSYTQAASSDSAQGSDVSLTACKV

SEQ ID NO: 37 - protein, 365 aa, Homo sapiens [sequence omitted]

SEQ ID NO: 38 - protein, 365 aa, Homo sapiens [sequence omitted]

SEQ ID NO: 39 - protein, 362 aa, Homo sapiens
MLVMAPRTVLLLLSAALALTETWAGSHSMRYFYTSVSRPGRGEPRFISVGYVDDTQFVRFDSDAASPREEPRAPWIEQEGPEYWDRNTQIYKAQAQTDRESLRNLRGYYNQSEAGSHTLQSMYGCDVGPDGRLLRGHDQYAYDGKDYIALNEDLRSWTAADTAAQITQRKWEAAREAEQRRAYLEGECVEWLRRYLENGKDKLERADPPKTHVTHHPISDHEATLRCWALGFYPAEITLTWQRDGEDQTQDTELVETRPAGDRTFQKWAAVVVPSGEEQRYTCHVQHEGLPKPLTLRWEPSSQSTVPIVGIVAGLAVLAVVVIGAVVAAVMCRRKSSGGKGGSYSQAACSDSAQGSDVSLTA

SEQ ID NO: 40 - protein, 366 aa, Homo sapiens
MRVMAPRALLLLLSGGLALTETWACSHSMRYFDTAVSRPGRGEPRFISVGYVDDTQFVRFDSDAASPRGEPRAPWVEQEGPEYWDRETQNYKRQAQADRVSLRNLRGYYNQSEDGSHTLQRMYGCDLGPDGRLLRGYDQSAYDGKDYIALNEDLRSWTAADTAAQITQRKLEAARAAEQLRAYLEGTCVEWLRRYLENGKETLQRAEPPKTHVTHHPLSDHEATLRCWALGFYPAEITLTWQRDGEDQTQDTELVETRPAGDGTFQKWAAVVVPSGQEQRYTCHMQHEGLQEPLTLSWEPSSQPTIPIMGIVAGLAVLVVLAVLGAVVTAMMCRRKSSGGKGGSCSQAACSNSAQGSDESLITCKA

SEQ ID NO: 41 - protein, 275 aa, Homo sapiens
GSHSMRYFFTSVSRPGRGEPRFIAVGYVDDTQFVRFDSDAASQKMEPRAPWIEQEGPEYWDQETRNMKAHSQTDRANLGTLRGYYNQSEDGSHTIQIMYGCDVGPDGRFLRGYRQDAYDGKDYIALNEDLRSWTAADMAAQITKRKWEAVHAAEQRRVYLEGRCVDGLRRYLENGKETLQRTDPPKTHMTHHPISDHEATLRCWALGFYPAEITLTWQRDGEDQTQDTELVETRPAGDGTFQKWAAVVVPSGEEQRYTCHVQHEGLPKPLTLRWE

SEQ ID NO: 42 - protein, 275 aa, Homo sapiens
GSHSMRYFYTSVSRPGRGEPRFISVGYVDDTQFVRFDSDAASPREEPRAPWIEQEGPEYWDRNTQIYKAQAQTDRESLRNLRGYYNQSEAGSHTLQSMYGCDVGPDGRLLRGHDQYAYDGKDYIALNEDLRSWTAADTAAQITQRKWEAAREAEQRRAYLEGECVEWLRRYLENGKDKLERADPPKTHVTHHPISDHEATLRCWALGFYPAEITLTWQRDGEDQTQDTELVETRPAGDRTFQKWAAVVVPSGEEQRYTCHVQHEGLPKPLTLRWE

SEQ ID NO: 43 - protein, 275 aa, Homo sapiens
CSHSMRYFDTAVSRPGRGEPRFISVGYVDDTQFVRFDSDAASPRGEPRAPWVEQEGPEYWDRETQNYKRQAQADRVSLRNLRGYYNQSEDGSHTLQRMYGCDLGPDGRLLRGYDQSAYDGKDYIALNEDLRSWTAADTAAQITQRKLEAARAAEQLRAYLEGTCVEWLRRYLENGKETLQRAEPPKTHVTHHPLSDHEATLRCWALGFYPAEITLTWQRDGEDQTQDTELVETRPAGDGTFQKWAAVVVPSGQEQRYTCHMQHEGLQEPLTLSWE

SEQ ID NO: 44 - protein, 276 aa, Homo sapiens [sequence omitted]

SEQ ID NO: 45 - protein, 274 aa, Mus musculus
GPHSLRYFVTAVSRPGLGEPRFIAVGYVDDTQFVRFDSDADNPRFEPRAPWMEQEGPEYWEEQTQRAKSDEQWFRVSLRTAQRYYNQSKGGSHTFQRMFGCDVGSDWRLLRGYQQFAYDGRDYIALNEDLKTWTAADTAALITRRKWEQAGDAEYYRAYLEGECVEWLRRYLELGNETLLRTDSPKAHVTYHPRSQVDVTLRCWALGFYPADITLTWQLNGEDLTQDMELVETRPAGDGTFQKWAAVVVPLGKEQNYTCHVHHKGLPEPLTLRW

SEQ ID NO: 46 - protein, 275 aa, Artificial sequence
  synthetic sequence
GSHSMRYFFTSVSRPGRGEPRFIAVGYVDDTQFVRFDSDAASQRMEPRAPWIEQEGPEYWDGETRKVKAHSQTHRVDLGTLRGAYNQSEAGSHTVQRMYGCDVGSDWRFLRGYHQYAYDGKDYIALKEDLRSWTAADMAAQTTKHKWEAAHVAEQLRAYLEGTCVEWLRRYLENGKETLQRTDAPKTHMTHHAVSDHEATLRCWALSFYPAEITLTWQRDGEDQTQDTELVETRPCGDGTFQKWAAVVVPSGQEQRYTCHVQHEGLPKPLTLRWE

SEQ ID NO: 47 - protein, 275 aa, Artificial sequence
  synthetic sequence
GSHSMRYFFTSVSRPGRGEPRFIAVGYVDDTQFVRFDSDAASQRMEPRAPWIEQEGPEYWDGETRKVKAHSQTHRVDLGTLRGCYNQSEAGSHTVQRMYGCDVGSDWRFLRGYHQYAYDGKDYIALKEDLRSWTAADMCAQTTKHKWEAAHVAEQLRAYLEGTCVEWLRRYLENGKETLQRTDAPKTHMTHHAVSDHEATLRCWALSFYPAEITLTWQRDGEDQTQDTELVETRPCGDGTFQKWAAVVVPSGQEQRYTCHVQHEGLPKPLTLRWE

SEQ ID NO: 48 - protein, 276 aa, Artificial sequence
  synthetic sequence
GSHSMRYFFTSVSRPGRGEPRFIAVGYVDDTQFVRFDSDAASQRMEPRAPWIEQEGPEYWDGETRKVKAHSQTHRVDLGTLRGAYNQSEAGSHTVQRMYGCDVGSDWRFLRGYHQYAYDGKDYIALKEDLRSWTAADMAAQTTKHKWEAAHVAEQLRAYLEGTCVEWLRRYLENGKETLQRTDAPKTHMTHHAVSDHEATLRCWALSFYPAEITLTWQRDGEDQTQDTELVETRPCGDGTFQKWAAVVVPSGQEQRYTCHVQHEGLPKPLTLRWEP

SEQ ID NO: 49 - protein, 276 aa, Homo sapiens
GSHSMRYFYTSVSRPGRGEPRFIAVGYVDDTQFVRFDSDAASQRMEPRAPWIEQEGPEYWDQETRNVKAQSQTDRVDLGTLRGYYNQSEDGSHTIQIMYGCDVGPDGRFLRGYRQDAYDGKDYIALNEDLRSWTAADMAAQITKRKWEAAHAAEQQRAYLEGRCVEWLRRYLENGKETLQRTDPPKTHMTHHPISDHEATLRCWALGFYPAEITLTWQRDGEDQTQDTELVETRPAGDGTFQKWAAVVVPSGEEQRYTCHVQHEGLPKPLTLRWEL

SEQ ID NO: 50 - protein, 276 aa, Homo sapiens
GSHSMRYFSTSVSRPGRGEPRFIAVGYVDDTQFVRFDSDAASQRMEPRAPWIEQEGPEYWDEETGKVKAHSQTDRENLRIALRYYNQSEAGSHTLQMMFGCDVGSDGRFLRGYHQYAYDGKDYIALKEDLRSWTAADMAAQITKRKWEAAHVAEQQRAYLEGTCVDGLRRYLENGKETLQRTDPPKTHMTHHPISDHEATLRCWALGFYPAEITLTWQRDGEDQTQDTELVETRPAGDGTFQKWAAVVVPSGEEQRYTCHVQHEGLPKPLTLRWEP

SEQ ID NO: 51 - protein, 276 aa, Homo sapiens
GSHSMRYFTTSVSRPGRGEPRFIAVGYVDDTQFVRFDSDAASQRMEPRAPWIEQEGPEYWDRNTRNVKAHSQIDRVDLGTLRGYYNQSEAGSHTIQMMYGCDVGSDGRFLRGYQQDAYDGKDYIALNEDLRSWTAADMAAQITQRKWEAARVAEQLRAYLEGTCVEWLRRYLENGKETLQRTDPPKTHMTHHAVSDHEATLRCWALSFYPAEITLTWQRDGEDQTQDTELVETRPAGDGTFQKWASVVVPSGQEQRYTCHVQHEGLPKPLTLRWEP

SEQ ID NO: 52 - protein, 276 aa, Artificial sequence
  synthetic sequence
GSHSMRYFFTSVSRPGRGEPRFIAVGYVDDTQFVRFDSDAASQKMEPRAPWIEQEGPEYWDQETRNMKAHSQTDRANLGTLRGYYNQSEDGSHTIQIMYGCDVGPDGRFLRGYRQDAYDGKDYIALNEDLRSWTAADMAAQITKRKWEAVHAAEQRRVYLEGRCVDGLRRYLENGKETLQRTDPPKTHMTHHPISDHEATLRCWALGFYPAEITLTWQRDGEDQTQDTELVETRPAGDGTFQKWAAVVVPSGEEQRYTCHVQHEGLPKPLTLRWEL

SEQ ID NO: 53 - protein, 276 aa, Artificial sequence [sequence omitted]

SEQ ID NO: 54 - protein, 276 aa, Artificial sequence
  synthetic sequence
GSHSMRYFFTSVSRPGRGEPRFIAVGYVDDTQFVRFDSDAASQRMEPRAPWIEQEGPEYWDQETRNVKAQSQTDRVDLGTLRGYYNQSEAGSHTIQIMYGCDVGSDGRFLRGYRQDAYDGKDYIALNEDLRSWTAADMAAQITKRKWEAAHEAEQLRAYLDGTCVEWLRRYLENGKETLQRTDPPKTHMTHHPISDHEATLRCWALGFYPAEITLTWQRDGEDQTQDTELVETRPAGDGTFQKWAAVVVPSGEEQRYTCHVQHEGLPKPLTLRWEL

SEQ ID NO: 55 - protein, 276 aa, Artificial sequence; identical to SEQ ID NO: 49
  synthetic sequence

SEQ ID NO: 56 - protein, 276 aa, Artificial sequence
  synthetic sequence
GSHSMRYFSTSVSRPGRGEPRFIAVGYVDDTQFVRFDSDAASQRMEPRAPWIEQEGPEYWDEETGKVKAHSQTDRENLRIALRYYNQSEAGSHTLQMMFGCDVGSDGRFLRGYHQYAYDGKDYIALKEDLRSWTAADMAAQITQRKWEAARVAEQLRAYLEGTCVDGLRRYLENGKETLQRTDPPKTHMTHHPISDHEATLRCWALGFYPAEITLTWQRDGEDQTQDTELVETRPAGDGTFQKWAAVVVPSGEEQRYTCHVQHEGLPKPLTLRWEP

SEQ ID NO: 57 - protein, 276 aa, Artificial sequence; identical to SEQ ID NO: 50
  synthetic sequence

SEQ ID NO: 58 - protein, 276 aa, Artificial sequence
  synthetic sequence
GSHSMRYFSTSVSRPGRGEPRFIAVGYVDDTQFVRFDSDAASQRMEPRAPWIEQEGPEYWDEETGKVKAQSQTDRENLRIALRYYNQSEAGSHTLQMMFGCDVGSDGRFLRGYHQYAYDGKDYIALKEDLRSWTAADMAAQITKRKWEAAHVAEQQRAYLEGTCVDGLRRYLENGKETLQRTDPPKTHMTHHPISDHEATLRCWALGFYPAEITLTWQRDGEDQTQDTELVETRPAGDGTFQKWAAVVVPSGEEQRYTCHVQHEGLPKPLTLRWEP

SEQ ID NO: 59 - protein, 276 aa, Artificial sequence; identical to SEQ ID NO: 51
  synthetic sequence

SEQ ID NO: 60 - protein, 276 aa, Artificial sequence
  synthetic sequence
GSHSMRYFYTSVSRPGRGEPRFIAVGYVDDTQFVRFDSDAASQRMEPRAPWIEQEGPEYWDRNTRKVKAQSQTDRVDLGTLRGYYNQSEDGSHTIQRMYGCDVGPDGRFLRGYQQDAYDGKDYIALNEDLRSWTAADMAAQITQRKWETAHEAEQWRAYLEGTCVEWLRRYLENGKETLQRTDAPKTHMTHHAVSDHEATLRCWALSFYPAEITLTWQRDGEDQTQDTELVETRPAGDGTFQKWASVVVPSGQEQRYTCHVQHEGLPKPLTLRWEP

SEQ ID NO: 61 - protein, 276 aa, Artificial sequence
  synthetic sequence
  Misc_feature (9)..(9): X is phenylalanine, tyrosine, serine, or threonine
  Misc_feature (44)..(44): X is lysine or arginine
  Misc_feature (62)..(62): X is glutamine, glycine, glutamic acid, or arginine
  Misc_feature (63)..(63): X is asparagine or glutamic acid
  Misc_feature (65)..(65): X is arginine or glycine
  Misc_feature (66)..(66): X is asparagine or lysine
  Misc_feature (67)..(67): X is methionine or valine
  Misc_feature (70)..(70): X is histidine or glutamine
  Misc_feature (73)..(73): X is threonine or isoleucine
  Misc_feature (74)..(74): X is aspartic acid or histidine
  Misc_feature (76)..(76): X is alanine, valine, or glutamic acid
  Misc_feature (77)..(77): X is asparagine or aspartic acid
  Misc_feature (79)..(79): X is glycine or arginine
  Misc_feature (80)..(80): X is threonine or arginine
  Misc_feature (81)..(81): X is leucine or alanine
  Misc_feature (82)..(82): X is arginine or leucine
  Misc_feature (83)..(83): X is glycine ir arginine
  Misc_feature (90)..(90): X is alanine or aspartic acid
  Misc_feature (95)..(95): X is isoleucine, leucine, or valine
  Misc_feature (97)..(97): X is isoleucine, arginine, or methionine
  Misc_feature (99)..(99): X is phenylalanine or tyrosine
  Misc_feature (105)..(105): X is serine or proline
  Misc_feature (107)..(107): X is tryptophan or glycine
  Misc_feature (114)..(114): X is arginine, histidine, or glutamine
  Misc_feature (116)..(116): X is aspartic acid or tyrosine
  Misc_feature (127)..(127): X is asparagine or lysine
  Misc_feature (142)..(142): X is threonine or isoleucine
  Misc_feature (144)..(144): X is lysine or glutamine
  Misc_feature (145)..(145): X is arginine or histidine
  Misc_feature (149)..(149): X is alanine or threonine
  Misc_feature (150)..(150): X is alanine or valine
  Misc_feature (151)..(151): X is histidine or arginine
  Misc_feature (156)..(156): X is arginine, leucine, glutamine, or tryptophan
  Misc_feature (158)..(158): X is valine or alanine
  Misc_feature (161)..(161): X is aspartic acid or glutamic acid
  Misc_feature (163)..(163): X is arginine or threonine
  Misc_feature (166)..(166): X is aspartic acid or glutamic acid
  Misc_feature (167)..(167): X is tryptophan or glycine
  Misc_feature (184)..(184): X is proline or alanine
  Misc_feature (193)..(193): X is proline or alanine
  Misc_feature (194)..(194): X is valine or isoleucine
  Misc_feature (207)..(207): X is serine or glycine
  Misc_feature (246)..(246): X is alanine or serine
  Misc_feature (253)..(253): X is glutamine or glutamic acid
  Misc_feature (276)..(276): X is proline or leucine
GSHSMRYFXTSVSRPGRGEPRFIAVGYVDDTQFVRFDSDAASQXMEPRAPWIEQEGPEYWDXXTXXXKAXSQXXRXXLXXXXXYYNQSEXGSHTXQXMXGCDVGXDXRFLRGYXQXAYDGKDYIALXEDLRSWTAADMAAQXTXXKWEXXXEAEQXRXYLXGXCVXXLRRYLENGKETLQRTDXPKTHMTHHXXSDHEATLRCWALXFYPAEITLTWQRDGEDQTQDTELVETRPAGDGTFQKWAXVVVPSGXEQRYTCHVQHEGLPKPLTLRWEX

SEQ ID NO: 62 - protein, 276 aa, Artificial sequence [sequence omitted]

SEQ ID NO: 63 - protein, 276 aa, Artificial sequence
  synthetic sequence
GSHSMRYFDTAMSRPGRGEPRFISVGYVDDTQFVRFDSDAASPREEPRAPWIEQEGPEYWDRNTQIFKTNTQTDRESLRNLRGYYNQSEAGSHTLQSMYGCDVGPDGRLLRGHNQYAYDGKDYIALNEDLRSWTAADTAAQITQRKWEAARVAEQDRAYLEGTCVEWLRRYLENGKDTLERADPPKTHVTHHPISDHEATLRCWALGFYPAEITLTWQRDGEDQTQDTELVETRPAGDRTFQKWAAVVVPSGEEQRYTCHVQHEGLPKPLTLRWEP

SEQ ID NO: 64 - protein, 276 aa, Artificial sequence
  synthetic sequence
GSHSMRYFYTAMSRPGRGEPRFIAVGYVDDTQFVRFDSDAASPRMAPRAPWIEQEGPEYWDRNTQISKTNTQTYRESLRNLRGYYNQSEAGSHIIQRMYGCDVGPDGRLLRGYDQSAYDGKDYIALNEDLSSWTAADTAAQITQRKWEAAREAEQLRAYLEGLCVEWLRRYLENGKETLQRADPPKTHVTHHPISDHEATLRCWALGFYPAEITLTWQRDGEDQTQDTELVETRPAGDRTFQKWAAVVVPSGEEQRYTCHVQHEGLPKPLTLRWEP

SEQ ID NO: 65 - protein, 276 aa, Artificial sequence
  synthetic sequence
GSHSMRYFYTSVSRPGRGEPRFISVGYVDDTQFVRFDSDAASPREEPRAPWIEQEGPEYWDRNTQICKTNTQTYRENLRTALRYYNQSEAGSHTLQRMYGCDVGPDGRLLRGHNQFAYDGKDYIALNEDLSSWTAADTAAQITQRKWEAARVAEQLRTYLEGTCVEWLRRYLENGKETLQRADPPKTHVTHHPISDHEATLRCWALGFYPAEITLTWQRDGEDQTQDTELVETRPAGDRTFQKWAAVVVPSGEEQRYTCHVQHEGLPKPLTLRWEP

SEQ ID NO: 66 - protein, 276 aa, Artificial sequence
  synthetic sequence
GSHSMRYFHTAMSRPGRGEPRFITVGYVDDTLFVRFDSDATSPRKEPRAPWIEQEGPEYWDRETQISKTNTQTYRESLRNLRGYYNQSEAGSHTLQRMYGCDVGPDGRLLRGHNQYAYDGKDYIALNEDLRSWTAADTAAQISQRKLEAARVAEQLRAYLEGECVEWLRRYLENGKDKLERADPPKTHVTHHPISDHEATLRCWALGFYPAEITLTWQRDGEDQTQDTELVETRPAGDRTFQKWAAVVVPSGEEQRYTCHVQHEGLPKPLTLRWEP

SEQ ID NO: 67 - protein, 276 aa, Artificial sequence
  synthetic sequence
GSHSMRYFYTAMSRPGRGEPRFIAVGYVDDTQFVRFDSDAASPRMAPRAPWIEQEGPEYWDRETQKYKRQAQTDRVSLRNLRGYYNQSEAGSHTLQRMYGCDVGPDGRLLRGHDQSAYDGKDYIALNEDLSSWTAADTAAQITQRKWEAAREAEQWRAYLEGLCVEWLRRYLENGKETLQRADPPKTHVTHHPISDHEATLRCWALGFYPAEITLTWQRDGEDQTQDTELVETRPAGDRTFQKWAAVVVPSGEEQRYTCHVQHEGLPKPLTLRWEP

SEQ ID NO: 68 - protein, 276 aa, Artificial sequence
  synthetic sequence
GSHSMRYFYTAMSRPGRGEPRFIAVGYVDDTQFVRFDSDAASPRTEPRAPWIEQEGPEYWDRNTQIFKTNTQTYRENLRIALRYYNQSEAGSHIIQRMYGCDLGPDGRLLRGHDQSAYDGKDYIALNEDLSSWTAADTAAQITQRKWEAARVAEQLRAYLEGLCVEWLRRYLENGKETLQRADPPKTHVTHHPVSDHEATLRCWALGFYPAEITLTWQRDGEDQTQDTELVETRPAGDRTFQKWAAVVVPSGEEQRYTCHVQHEGLPKPLTLRWEP

SEQ ID NO: 69 - protein, 276 aa, Artificial sequence
  synthetic sequence
  Misc_feature (9)..(9): X is histidine, tyrosine, or aspartic acid
  Misc_feature (11)..(11): X is alanine or serine
  Misc_feature (12)..(12): X is methionine or valine
  Misc_feature (24)..(24): X is alanine, serine, or threonine
  Misc_feature (32)..(32): X is glutamine or leucine
  Misc_feature (41)..(41): X is alanine or threonine
  Misc_feature (45)..(45): X is glutamic acid, methionine, lysine, or threonine
  Misc_feature (46)..(46): X is alanine or threonine
  Misc_feature (63)..(63): X is glutamic acid or asparagine
  Misc_feature (66)..(66): X is isoleucine or lysine
  Misc_feature (67)..(67): X is tyrosine, phenylalanie, serine, or cystine
  Misc_feature (70)..(70): X is asparagine or glutamine
  Misc_feature (71)..(71): X is alanine or threonine
  Misc_feature (74)..(74): X is aspartic acid or tyrosine
  Misc_feature (76)..(76): X is glutamic acid or valine
  Misc_feature (77)..(77): X is serine or asparagine
  Misc_feature (80)..(80): X is threonine, asparagine, or isoleucine
  Misc_feature (81)..(81): X is alanine or leucine
  Misc_feature (82)..(82): X is leucine or arginine
  Misc_feature (83)..(83): X is arginine or glycine
  Misc_feature (94)..(94): X is threonine or isoleucine
  Misc_feature (95)..(95): X is leucine or isoleucine
  Misc_feature (97)..(97): X is arginine or serine
  Misc_feature (131)..(131): X is arginine or serine
  Misc_feature (143)..(143): X is S or T
  Misc_feature (147)..(147): X is L or W
  misc_feature (152)..(152): Xaa is E OR V
  misc_feature (156)..(156): Xaa is R, D, L
  misc_feature (158)..(158): Xaa A or T
  Misc_feature (163)..(163): X is leucine, glutamic acid, or threonine
  Misc_feature (177)..(177): X is glutamic acid or aspartic acid
  Misc_feature (178)..(178): X is lysine or threonine
  Misc_feature (180)..(180): X is glutamic acid or glutamine
  Misc_feature (194)..(194): X is isoleucine or valine
GSHSMRYFXTXXSRPGRGEPRFIXVGYVDDTXFVRFDSDAXSPRXXPRAPWIEQEGPEYWDRXTQXXKTXXTQXYXXNLXXXXYYNQSEAGSHXXQXMYGCDLGPDGRLLRGHDQSAYDGKDYIALNEDLXSWTAADTAAQIXQRKXEAARXAEQXRXYLEGXCVEWLRRYLENGKXXLXRADPPKTHVTHHPXSDHEATLRCWALGFYPAEITLTWQRDGEDQTQDTELVETRPAGDRTFQKWAAVVVPSGEEQRYTCHVQHEGLPKPLTLRWEP

SEQ ID NO: 70 - protein, 276 aa, Artificial sequence
  synthetic sequence
CSHSMKYFFTSVSRPGRGEPRFISVGYVDDTQFVRFDSDAASPRGEPRAPWVEQEGPEYWDRETQKYKRQAQTDRVSLRNLRGYYNQSEAGSHTLQWMCGCDLGPDGRLLRGYDQYAYDGKDYIALNEDLRSWTAADTAAQITQRKWEAAREAEQRRAYLEGTCVEWLRRYLENGKETLQRAEHPKTHVTHHPVSDHEATLRCWALGFYPAEITLTWQWDGEDQTQDTELVETRPAGDGTFQKWAAVMVPSGEEQRYTCHVQHEGLPEPLTLRWEP

SEQ ID NO: 71 - protein, 276 aa, Artificial sequence
  synthetic sequence
GSHSMRYFYTAVSRPGRGEPHFIAVGYVDDTQFVRFDSDAASPRGEPRAPWVEQEGPEYWDRETQKYKRQAQTDRVSLRNLRGYYNQSEARSHIIQRMYGCDVGPDGRLLRGYDQYAYDGKDYIALNEDLRSWTAADTAAQITQRKWEAAREAEQLRAYLEGLCVEWLRRYLKNGKETLQRAEHPKTHVTHHPVSDHEATLRCWALGFYPAEITLTWQWDGEDQTQDTELVETRPAGDGTFQKWAAVVVPSGEEQRYTCHVQHEGLPEPLTLRWEP

SEQ ID NO: 72 - protein, 276 aa, Artificial sequence
  synthetic sequence
GSHSMRYFYTAVSRPGRGEPHFIAVGYVDDTQFVRFDSDAASPRGEPRAPWVEQEGPEYWDRETQKYKRQAQTDRVSLRNLRGYYNQSEAGSHIIQRMYGCDVGPDGRLLRGYDQYAYDGKDYIALNEDLRSWTAADTAAQITQRKWEAAREAEQLRAYLEGLCVEWLRRYLKNGKETLQRAEHPKTHVTHHPVSDHEATLRCWALGFYPAEITLTWQWDGEDQTQDTELVETRPAGDGTFQKWAAVVVPSGEEQRYTCHVQHEGLPEPLTLRWEP

SEQ ID NO: 73 - protein, 276 aa, Artificial sequence
  synthetic sequence
GSHSMRYFSTSVSWPGRGEPRFIAVGYVDDTQFVRFDSDAASPRGEPREPWVEQEGPEYWDRETQKYKRQAQADRVNLRKLRGYYNQSEDGSHTLQRMFGCDLGPDGRLLRGYNQFAYDGKDYIALNEDLRSWTAADTAAQITQRKWEAAREAEQRRAYLEGTCVEWLRRYLENGKETLQRAEHPKTHVTHHPVSDHEATLRCWALGFYPAEITLTWQWDGEDQTQDTELVETRPAGDGTFQKWAAVVVPSGEEQRYTCHVQHEGLPEPLTLRWKP

SEQ ID NO: 74 - protein, 276 aa, Artificial sequence
  synthetic sequence
CSHSMRYFDTAVSRPGRGEPRFISVGYVDDTQFVRFDSDAASPRGEPRAPWVEQEGPEYWDRETQKYKRQAQADRVNLRKLRGYYNQSEDGSHTLQWMYGCDLGPDGRLLRGYDQSAYDGKDYIALNEDLRSWTAADTAAQITQRKWEAAREAEQWRAYLEGTCVEWLRRYLENGKETLQRAEHPKTHVTHHPVSDHEATLRCWALGFYPAEITLTWQRDGEDQTQDTELVETRPAGDGTFQKWAAVVVPSGEEQRYTCHVQHEGLPEPLTLRWEP

SEQ ID NO: 75 - protein, 276 aa, Artificial sequence
  synthetic sequence
CSHSMRYFDTAVSRPGRGEPRFISVGYVDDTQFVRFDSDAASPRGEPRAPWVEQEGPEYWDRETQNYKRQAQADRVSLRNLRGYYNQSEDGSHTLQRMYGCDLGPDGRLLRGYDQSAYDGKDYIALNEDLRSWTAADTAAQITQRKLEAARAAEQLRAYLEGTCVEWLRRYLENGKETLQRAEPPKTHVTHHPLSDHEATLRCWALGFYPAEITLTWQRDGEDQTQDTELVETRPAGDGTFQKWAAVVVPSGQEQRYTCHMQHEGLQEPLTLSWEP

SEQ ID NO: 76 - protein, 276 aa, Artificial sequence
  synthetic sequence
CSHSMRYFDTAVSRPGRGEPRFISVGYVDDTQFVRFDSDAASPRGEPRAPWVEQEGPEYWDRETQKYKRQAQADRVSLRNLRGYYNQSEDGSHTLQRMSGCDLGPDGRLLRGYDQSAYDGKDYIALNEDLRSWTAADTAAQITQRKLEAARAAEQLRAYLEGTCVEWLRRYLENGKETLQRAEPPKTHVTHHPLSDHEATLRCWALGFYPAEITLTWQRDGEDQTQDTELVETRPAGDGTFQKWAAVVVPSGQEQRYTCHMQHEGLQEPLTLSWEP

SEQ ID NO: 77 - protein, 276 aa, Artificial sequence
  synthetic sequence
CSHSMRYFYTAVSRPGRGEPRFIAVGYVDDTQFVQFDSDAASPRGEPRAPWVEQEGPEYWDRETQKYKRQAQTDRVSLRNLRGYYNQSEAGSHTLQRMYGCDLGPDGRLLRGYNQFAYDGKDYIALNEDLRSWTAADTAAQITQRKWEAARTAEQLRAYLEGTCVEWLRRYLENGKKTLQRAEHPKTHVTHHPVSDHEATLRCWALGFYPAEITLTWQRDGEDQTQDTELVETRPAGDGTFQKWAAVVVPSGEEQRYTCHVQHEGLPEPLTLRWGP

SEQ ID NO: 78 - protein, 276 aa, Artificial sequence
  synthetic sequence
CSHSMRYFYTAVSRPGRGEPHFIAVGYVDDTQFVRFDSDAASPRGEPRAPWVEQEGPEYWDRETQNYKRQAQTDRVNLRKLRGYYNQSEAGSHIIQRMYGCDLGPDGRLLRGHDQLAYDGKDYIALNEDLRSWTAADTAAQITQRKWEAAREAEQLRAYLEGTCVEWLRRYLENGKETLQRAEHPKTHVTHHPVSDHEATLRCWALGFYPAEITLTWQRDGEDQTQDTELVETRPAGDGTFQKWAAVVVPSGEEQRYTCHVQHEGLPEPLTLRWEP

SEQ ID NO: 79 - protein, 276 aa, Artificial sequence
  synthetic sequence
  Misc_feature (1)..(1): X is cysteine or glycine
  Misc_feature (6)..(6): X is arginine or lysine
  Misc_feature (9)..(9): X is phenylalanine, tyrosine, serine, or aspartic acid
  Misc_feature (14)..(14): X is arginine or tryptophan
  Misc_feature (21)..(21): X is histidine or arginine
  Misc_feature (24)..(24): X is alanine or serine
  Misc_feature (35)..(35): X is glutamine or arginine
  Misc_feature (49)..(49): X is alanine or arginine
  Misc_feature (66)..(66): X is asparagine, or lysine
  Misc_feature (73)..(73): X is threonine or alanine
  Misc_feature (77)..(77): X is serine or asparagine
  Misc_feature (80)..(80): X is asparagine or lysine
  Misc_feature (90)..(90): X is alanine or aspartic acid
  Misc_feature (91)..(91): X is glycine or arginine
  Misc_feature (94)..(94): X is threonine or isoleucine
  Misc_feature (95)..(95): X is leucine or isoleucine
  Misc_feature (97)..(97): X is tryptophan or arginine
  Misc_feature (99)..(99): X is cysteine, tyrosine, phenylalanine, or serine
  Misc_feature (103)..(103): X is leucine or valine
  Misc_feature (113)..(113): X is tyrosine or histidine
  Misc_feature (114)..(114): X is aspartic acid or asparagine
  Misc_feature (116)..(116): X is tyrosine, phenylalanine, serine, or leucine
  Misc_feature (147)..(147): X is leucine or tryptophan
  Misc_feature (152)..(152): X is glutamic acid, alanine, or threonine
  Misc_feature (156)..(156): X is arginine, leucine, or tryptophan
  Misc_feature (163)..(163): X is leucine or threonine
  Misc_feature (173)..(173): X is glutamic acid or lysine
  Misc_feature (177)..(177): X is glutamic acid or lysine
  Misc_feature (184)..(184): X is histidine or proline
  Misc_feature (194)..(194): X is arginine or valine
  Misc_feature (219)..(219): X is tryptophan or arginine
  Misc_feature (248)..(248): X is valine or methionine
  Misc_feature (253)..(253): X is glutamic acid or lysine
  Misc_feature (261)..(261): X is methionine or valine
  Misc_feature (267)..(267): X is proline or glutamine
  Misc_feature (273)..(273): X is arginine or serine
  Misc_feature (275)..(275): X is proline or glycine
XSHSMXYFXTAVSXPGRGEPXFIXVGYVDDTQFVXFDSDAASPRGEPRXPWVEQEGPEYWDRETQXYKRQAQXDRVXLRXLRGYYNQSEXXSHXXQXMXGCDXGPDGRLLRGXXQXAYDGKDYIALNEDLRSWTAADTAAQITQRKXEAARXAEQXRAYLEGXCVEWLRRYLXNGKXTLQRAEXPKTHVTHHPXSDHEATLRCWALGFYPAEITLTWQXDGEDQTQDTELVETRPAGDGTFQKWAAVXVPSGXEQRYTCHXQHEGLXEPLTLXWXP

SEQ ID NO: 80 - protein, 284 aa, Artificial sequence
  synthetic sequence
  misc_feature (89)..(89): Xaa is K or E
  misc_feature (107)..(107): Xaa is R or G
  misc_feature (157)..(157): Xaa is R or G
  misc_feature (158)..(158): Xaa is A or V
  misc_feature (255)..(255): Xaa is Q or P
  misc_feature (267)..(267): Xaa is P or S
GSHSLKYFHTSVSRPGRGEPRFISVGYVDDTQFVRFDNDAASPRMVPRAPWMEQEGSEYWDRETRSARDTAQIFRVNLRTLRGYYNQSXAGSHTLQWMHGCELGPDXRFLRGYEQFAYDGKDYLTLNEDLRSWTAVDTAAQISEQKSNDASEAEHQXXYLEDTCVEWLHKYLEKGKETLLHLEPPKTHVTHHPISDHEATLRCWALGFYPAEITLTWQQDGEGHTQDTELVETRPAGDGTFQKWAAVVVPSGEEXRYTCHVQHEGLXEPVTLRWKPASQPTIPI

SEQ ID NO: 81 - protein, 284 aa, Artificial sequence
  synthetic sequence
  misc_feature (7)..(7): Xaa is Y or F
  misc_feature (50)..(50): Xaa is P or Q
  misc_feature (251)..(251): Xaa is S or P
  misc_feature (278)..(278): Xaa is P or L
GSHSLRXFSTAVSRPGRGEPRYIAVEYVDDTQFLRFDSDAAIPRMEPREXWVEQEGPQYWEWTTGYAKANAQTDRVALRNLLRRYNQSEAGSHTLQGMNGCDMGPDGRLLRGYHQHAYDGKDYISLNEDLRSWTAADTVAQITQRFYEAEEYAEEFRTYLEGECLELLRRYLENGKETLQRADPPKAHVAHHPISDHEATLRCWALGFYPAEITLTWQRDGEEQTQDTELVETRPAGDGTFQKWAAVVVPXGEEQRYTCHVQHEGLPQPLILRWEQSXQPTIPI

SEQ ID NO: 82 - protein, 284 aa, Artificial sequence
  synthetic sequence
  misc_feature (13)..(13): Xaa is S or F
  misc_feature (27)..(27): Xaa is Y or H
  misc_feature (31)..(31): Xaa is T, S, or M
  misc_feature (34)..(34): Xaa is L or V
  misc_feature (54)..(54): Xaa is Q or R
  misc_feature (81)..(81): Xaa is P or L
  misc_feature (100)..(100): Xaa is G or D
  misc_feature (104)..(104): Xaa is G or V
  misc_feature (105)..(105): Xaa is S or C
  misc_feature (110)..(110): Xaa is L or I
  misc_feature (159)..(159): Xaa is Y or H
  misc_feature (169)..(169): Xaa is H or R
  misc_feature (171)..(171): Xaa is Y or H
  misc_feature (178)..(178): Xaa is M or T
  misc_feature (185)..(185): Xaa is P or A
  misc_feature (219)..(219): Xaa is R, W, or Q
  misc_feature (258)..(258): Xaa is T or M
  misc_feature (275)..(275): Xaa is K or E
GSHSMRYFSAAVXRPGRGEPRFIAMGXVDDXQFXRFDSDSACPRMEPRAPWVEXEGPEYWEEETRNTKAHAQTDRMNLQTXRGYYNQSEASSHTLQWMIXCDLXXDGRLXRGYEQYAYDGKDYLALNEDLRSWTAADTAAQISKRKCEAANVAEQRRAXLEGTCVEWLXRXLENGKEXLQRADPXKTHVTHHPVFDYEATLRCWALGFYPAEIILTWQXDGEDQTQDVELVETRPAGDGTFQKWAAVVVPSGEEQRYXCHVQHEGLPEPLMLRWXQSSLPTIPI

SEQ ID NO: 83 - protein, 276 aa, Artificial sequence; identical to SEQ ID NO: 61
  synthetic sequence
  Misc_feature (9)..(9): X is phenylalanine, tyrosine, serine, or threonine
  Misc_feature (44)..(44): X is lysine or arginine
  Misc_feature (62)..(62): X is glutamine, glycine, glutamic acid, or arginine
  Misc_feature (63)..(63): X is asparagine or glutamic acid
  Misc_feature (65)..(65): X is arginine or glycine
  Misc_feature (66)..(66): X is asparagine or lysine
  Misc_feature (67)..(67): X is methionine or valine
  Misc_feature (70)..(70): X is histidine or glutamine
  Misc_feature (73)..(73): X is threonine or isoleucine
  Misc_feature (74)..(74): X is aspartic acid or histidine
  Misc_feature (76)..(76): X is alanine, valine, or glutamic acid
  Misc_feature (77)..(77): X is asparagine or aspartic acid
  Misc_feature (79)..(79): X is glycine or arginine
  Misc_feature (80)..(80): X is threonine or arginine
  Misc_feature (81)..(81): X is leucine or alanine
  Misc_feature (82)..(82): X is arginine or leucine
  Misc_feature (83)..(83): X is glycine ir arginine
  Misc_feature (90)..(90): X is alanine or aspartic acid
  Misc_feature (95)..(95): X is isoleucine, leucine, or valine
  Misc_feature (97)..(97): X is isoleucine, arginine, or methionine
  Misc_feature (99)..(99): X is phenylalanine or tyrosine
  Misc_feature (105)..(105): X is serine or proline
  Misc_feature (107)..(107): X is tryptophan or glycine
  Misc_feature (114)..(114): X is arginine, histidine, or glutamine
  Misc_feature (116)..(116): X is aspartic acid or tyrosine
  Misc_feature (127)..(127): X is asparagine or lysine
  Misc_feature (142)..(142): X is threonine or isoleucine
  Misc_feature (144)..(144): X is lysine or glutamine
  Misc_feature (145)..(145): X is arginine or histidine
  Misc_feature (149)..(149): X is alanine or threonine
  Misc_feature (150)..(150): X is alanine or valine
  Misc_feature (151)..(151): X is histidine or arginine
  Misc_feature (156)..(156): X is arginine, leucine, glutamine, or tryptophan
  Misc_feature (158)..(158): X is valine or alanine
  Misc_feature (161)..(161): X is aspartic acid or glutamic acid
  Misc_feature (163)..(163): X is arginine or threonine
  Misc_feature (166)..(166): X is aspartic acid or glutamic acid
  Misc_feature (167)..(167): X is tryptophan or glycine
  Misc_feature (184)..(184): X is proline or alanine
  Misc_feature (193)..(193): X is proline or alanine
  Misc_feature (194)..(194): X is valine or isoleucine
  Misc_feature (207)..(207): X is serine or glycine
  Misc_feature (246)..(246): X is alanine or serine
  Misc_feature (253)..(253): X is glutamine or glutamic acid
  Misc_feature (276)..(276): X is proline or leucine

SEQ ID NO: 84 - protein, 552 aa, Artificial sequence
  synthetic sequence
  Misc_feature (9)..(9): X is histidinem tyrosine, or aspartic acid
  Misc_feature (11)..(11): X is alanine or serine
  Misc_feature (12)..(12): X is methionine or valine
  Misc_feature (24)..(24): X is alanine, serine, or threonine
  Misc_feature (32)..(32): X is glutamie or leucine
  Misc_feature (41)..(41): X is alanine or threonine
  Misc_feature (45)..(45): X is glutamic acid, methionine, lysine, or threonine
  Misc_feature (46)..(46): X is alanine or threonine
  Misc_feature (63)..(63): X is glutamic acid or asparagine
  Misc_feature (66)..(66): X is isoleucine or lysine
  Misc_feature (67)..(67): X is tyrosine, phenylalanie, serine, or cystine
  Misc_feature (70)..(70): X is asparagine or glutamine
  Misc_feature (71)..(71): X is alanine or threonine
  Misc_feature (74)..(74): X is aspartic acid or tyrosine
  Misc_feature (76)..(76): X is glutamic acid or valine
  Misc_feature (77)..(77): X is serine or asparagine
  Misc_feature (80)..(80): X is threonine, asparagine, or isoleucine
  Misc_feature (81)..(81): X is alanine or leucine
  Misc_feature (82)..(82): X is leucine or arginine
  Misc_feature (83)..(83): X is arginine or glycine
  Misc_feature (94)..(94): X is threonine or isoleucine
  Misc_feature (95)..(95): X is leucine or isoleucine
  Misc_feature (97)..(97): X is arginine or serine
  Misc_feature (131)..(131): X is arginine or serine
  Misc_feature (143)..(143): X is S or T
  Misc_feature (147)..(147): X is L or W
  misc_feature (152)..(152): Xaa is E OR V
  misc_feature (156)..(156): Xaa is R, D, L
  misc_feature (158)..(158): Xaa A or T
  Misc_feature (163)..(163): X is leucine, glutamic acid, or threonine
  Misc_feature (177)..(177): X is glutamic acid or aspartic acid
  Misc_feature (178)..(178): X is lysine or threonine
  Misc_feature (180)..(180): X is glutamic acid or glutamine
  Misc_feature (194)..(194): X is isoleucine or valine
  misc_feature (285)..(285): Xaa can be any naturally occurring amino acid
  misc_feature (287)..(288): Xaa can be any naturally occurring amino acid
  misc_feature (300)..(300): Xaa can be any naturally occurring amino acid
  misc_feature (308)..(308): Xaa can be any naturally occurring amino acid
  misc_feature (317)..(317): Xaa can be any naturally occurring amino acid
  misc_feature (321)..(322): Xaa can be any naturally occurring amino acid
  misc_feature (339)..(339): Xaa can be any naturally occurring amino acid
  misc_feature (342)..(343): Xaa can be any naturally occurring amino acid
  misc_feature (346)..(347): Xaa can be any naturally occurring amino acid
  misc_feature (350)..(350): Xaa can be any naturally occurring amino acid
  misc_feature (352)..(353): Xaa can be any naturally occurring amino acid
  misc_feature (356)..(359): Xaa can be any naturally occurring amino acid
  misc_feature (370)..(371): Xaa can be any naturally occurring amino acid
  misc_feature (373)..(373): Xaa can be any naturally occurring amino acid
  misc_feature (407)..(407): Xaa can be any naturally occurring amino acid
  misc_feature (419)..(419): Xaa can be any naturally occurring amino acid
  misc_feature (423)..(423): Xaa can be any naturally occurring amino acid
  misc_feature (428)..(428): Xaa can be any naturally occurring amino acid
  misc_feature (432)..(432): Xaa can be any naturally occurring amino acid
  misc_feature (434)..(434): Xaa can be any naturally occurring amino acid
  misc_feature (439)..(439): Xaa can be any naturally occurring amino acid
  misc_feature (453)..(454): Xaa can be any naturally occurring amino acid
  misc_feature (456)..(456): Xaa can be any naturally occurring amino acid
  misc_feature (470)..(470): Xaa can be any naturally occurring amino acid
GSHSMRYFXTXXSRPGRGEPRFIXVGYVDDTXFVRFDSDAXSPRXXPRAPWIEQEGPEYWDRXTQXXKTXXTQXYXXNLXXXXYYNQSEAGSHXXQXMYGCDLGPDGRLLRGHDQSAYDGKDYIALNEDLXSWTAADTAAQIXQRKXEAARXAEQXRXYLEGXCVEWLRRYLENGKXXLXRADPPKTHVTHHPXSDHEATLRCWALGFYPAEITLTWQRDGEDQTQDTELVETRPAGDRTFQKWAAVVVPSGEEQRYTCHVQHEGLPKPLTLRWEPGSHSMRYFXTXXSRPGRGEPRFIXVGYVDDTXFVRFDSDAXSPRXXPRAPWIEQEGPEYWDRXTQXXKTXXTQXYXXNLXXXXYYNQSEAGSHXXQXMYGCDLGPDGRLLRGHDQSAYDGKDYIALNEDLXSWTAADTAAQIXQRKXEAARXAEQXRXYLEGXCVEWLRRYLENGKXXLXRADPPKTHVTHHPXSDHEATLRCWALGFYPAEITLTWQRDGEDQTQDTELVETRPAGDRTFQKWAAVVVPSGEEQRYTCHVQHEGLPKPLTLRWEP

SEQ ID NO: 85 - protein, 276 aa, Artificial sequence; identical to SEQ ID NO: 79
  synthetic sequence
  Misc_feature (1)..(1): X is cysteine or glycine
  Misc_feature (6)..(6): X is arginine or lysine
  Misc_feature (9)..(9): X is phenylalanine, tyrosine, serine, or aspartic acid
  Misc_feature (14)..(14): X is arginine or tryptophan
  Misc_feature (21)..(21): X is histidine or arginine
  Misc_feature (24)..(24): X is alanine or serine
  Misc_feature (35)..(35): X is glutamine or arginine
  Misc_feature (49)..(49): X is alanine or arginine
  Misc_feature (66)..(66): X is asparagine, or lysine
  Misc_feature (73)..(73): X is threonine or alanine
  Misc_feature (77)..(77): X is serine or asparagine
  Misc_feature (80)..(80): X is asparagine or lysine
  Misc_feature (90)..(90): X is alanine or aspartic acid
  Misc_feature (91)..(91): X is glycine or arginine
  Misc_feature (94)..(94): X is threonine or isoleucine
  Misc_feature (95)..(95): X is leucine or isoleucine
  Misc_feature (97)..(97): X is tryptophan or arginine
  Misc_feature (99)..(99): X is cysteine, tyrosine, phenylalanine, or serine
  Misc_feature (103)..(103): X is leucine or valine
  Misc_feature (113)..(113): X is tyrosine or histidine
  Misc_feature (114)..(114): X is aspartic acid or asparagine
  Misc_feature (116)..(116): X is tyrosine, phenylalanine, serine, or leucine
  Misc_feature (147)..(147): X is leucine or tryptophan
  Misc_feature (152)..(152): X is glutamic acid, alanine, or threonine
  Misc_feature (156)..(156): X is arginine, leucine, or tryptophan
  Misc_feature (163)..(163): X is leucine or threonine
  Misc_feature (173)..(173): X is glutamic acid or lysine
  Misc_feature (177)..(177): X is glutamic acid or lysine
  Misc_feature (184)..(184): X is histidine or proline
  Misc_feature (194)..(194): X is arginine or valine
  Misc_feature (219)..(219): X is tryptophan or arginine
  Misc_feature (248)..(248): X is valine or methionine
  Misc_feature (253)..(253): X is glutamic acid or lysine
  Misc_feature (261)..(261): X is methionine or valine
  Misc_feature (267)..(267): X is proline or glutamine
  Misc_feature (273)..(273): X is arginine or serine
  Misc_feature (275)..(275): X is proline or glycine

SEQ ID NO: 86 - protein, 284 aa, Artificial sequence; identical to SEQ ID NO: 80
  synthetic sequence
  misc_feature (89)..(89): Xaa is K or E
  misc_feature (107)..(107): Xaa is R or G
  misc_feature (157)..(157): Xaa is R or G
  misc_feature (158)..(158): Xaa is A or V
  misc_feature (255)..(255): Xaa is Q or P
  misc_feature (267)..(267): Xaa is P or S

SEQ ID NO: 87 - protein, 284 aa, Artificial sequence; identical to SEQ ID NO: 81
  synthetic sequence
  misc_feature (7)..(7): Xaa is Y or F
  misc_feature (50)..(50): Xaa is P or Q
  misc_feature (251)..(251): Xaa is S or P
  misc_feature (278)..(278): Xaa is P or L

SEQ ID NO: 88 - protein, 284 aa, Artificial sequence; identical to SEQ ID NO: 82
  synthetic sequence
  misc_feature (13)..(13): Xaa is S or F
  misc_feature (27)..(27): Xaa is Y or H
  misc_feature (31)..(31): Xaa is T, S, or M
  misc_feature (34)..(34): Xaa is L or V
  misc_feature (54)..(54): Xaa is Q or R
  misc_feature (81)..(81): Xaa is P or L
  misc_feature (100)..(100): Xaa is G or D
  misc_feature (104)..(104): Xaa is G or V
  misc_feature (105)..(105): Xaa is S or C
  misc_feature (110)..(110): Xaa is L or I
  misc_feature (159)..(159): Xaa is Y or H
  misc_feature (169)..(169): Xaa is H or R
  misc_feature (171)..(171): Xaa is Y or H
  misc_feature (178)..(178): Xaa is M or T
  misc_feature (185)..(185): Xaa is P or A
  misc_feature (219)..(219): Xaa is R, W, or Q
  misc_feature (258)..(258): Xaa is T or M
  misc_feature (275)..(275): Xaa is K or E

SEQ ID NO: 89 - protein, 188 aa, Artificial sequence
  synthetic sequence
  MISC_FEATURE (5)..(5): Xaa is Lys, Phe, or Leu
  MISC_FEATURE (7)..(7): Xaa is Val or Leu
  MISC_FEATURE (8)..(8): Xaa is Val or Thr
  MISC_FEATURE (9)..(9): Xaa is Val or Thr
  MISC_FEATURE (12)..(12): Xaa is Gly, Asp, Cys, Val, or Ser where one or both of Xaa at position 12 and Xaa at position 13 is not a Cys
  MISC_FEATURE (13)..(13): Xaa is Gly, Cys, or Asp where one or both of Xaa at position 12 and Xaa at position 13 is not a Cys
MTEYXLXXXGAXXVGKSALTIQLIQNHFVDEYDPTIEDSYRKQVVIDGETCLWDILDTAGQEEYSAMRDQYMRTGEGFLCVFAINNTKSFEDIHHYREQIKRVKDSEDVPMVLVGNKCDLPSRTVDTKQAQDLARSYGIPFIETSAKTRQGVDDAFYTLVREIRKHKEKMSKDGKKKKKKSKTKCVIM

SEQ ID NO: 90 - protein, 8 aa, Artificial sequence
  synthetic sequence
  misc_feature (1)..(8): Xaa can be any naturally occurring amino acid
XXXXXXXX

SEQ ID NO: 91 - protein, 8 aa, Artificial sequence
  synthetic sequence
  misc_feature (1)..(8): Xaa can be any naturally occurring amino acid
XXXXXXXX

SEQ ID NO: 92 - protein, 8 aa, Artificial sequence
  synthetic sequence
  misc_feature (1)..(8): Xaa can be any naturally occurring amino acid
XXXXXXXX

SEQ ID NO: 93 - protein, 8 aa, Artificial sequence
  synthetic sequence
  misc_feature (1)..(8): Xaa can be any naturally occurring amino acid
XXXXXXXX

SEQ ID NO: 94 - protein, 8 aa, Artificial sequence
  synthetic sequence
  misc_feature (1)..(8): Xaa can be any naturally occurring amino acid
XXXXXXXX

SEQ ID NO: 95 - protein, 8 aa, Artificial sequence
  synthetic sequence
  misc_feature (1)..(8): Xaa can be any naturally occurring amino acid
XXXXXXXX

SEQ ID NO: 96 - protein, 8 aa, Artificial sequence
  synthetic sequence
  misc_feature (1)..(8): Xaa can be any naturally occurring amino acid
XXXXXXXX

SEQ ID NO: 97 - protein, 8 aa, Artificial sequence
  synthetic sequence
  misc_feature (1)..(8): Xaa can be any naturally occurring amino acid
XXXXXXXX

SEQ ID NO: 98 - protein, 5 aa, Artificial sequence
  synthetic sequence
GTLRG

SEQ ID NO: 99 - protein, 5 aa, Artificial sequence
  synthetic sequence
YNQSE

SEQ ID NO: 100 - protein, 5 aa, Artificial sequence
  synthetic sequence
TAADM

SEQ ID NO: 101 - protein, 5 aa, Artificial sequence
  synthetic sequence
AQTTK

SEQ ID NO: 102 - protein, 5 aa, Artificial sequence
  synthetic sequence
VETRP

SEQ ID NO: 103 - protein, 5 aa, Artificial sequence
  synthetic sequence
GDGTF

SEQ ID NO: 104 - protein, 5 aa, Artificial sequence
  synthetic sequence
RNLRG

SEQ ID NO: 105 - protein, 5 aa, Artificial sequence
  synthetic sequence
TAADT

SEQ ID NO: 106 - protein, 5 aa, Artificial sequence
  synthetic sequence
AQITQ

SEQ ID NO: 107 - protein, 5 aa, Artificial sequence
  synthetic sequence
GDRTF

SEQ ID NO: 108 - protein, 276 aa, Artificial sequence [sequence omitted]

SEQ ID NO: 109 - protein, 276 aa, Artificial sequence [sequence omitted]

SEQ ID NO: 110 - protein, 275 aa, Artificial sequence [sequence omitted]

SEQ ID NO: 111 - protein, 276 aa, Artificial sequence; identical to SEQ ID NO: 48
  synthetic sequence

SEQ ID NO: 112 - protein, 276 aa, Artificial sequence; identical to SEQ ID NO: 48
  synthetic sequence

SEQ ID NO: 113 - protein, 275 aa, Artificial sequence; identical to SEQ ID NO: 46
  synthetic sequence

SEQ ID NO: 114 - protein, 276 aa, Artificial sequence
  synthetic sequence
GSHSMRYFFTSVSRPGRGEPRFIAVGYVDDTQFVRFDSDAASQRMEPRAPWIEQEGPEYWDGETRKVKAHSQTHRVDLGTLRGCYNQSEAGSHTVQRMYGCDVGSDWRFLRGYHQYAYDGKDYIALKEDLRSWTAADMCAQTTKHKWEAAHVAEQLRAYLEGTCVEWLRRYLENGKETLQRTDAPKTHMTHHAVSDHEATLRCWALSFYPAEITLTWQRDGEDQTQDTELVETRPAGDGTFQKWAAVVVPSGQEQRYTCHVQHEGLPKPLTLRWEP

SEQ ID NO: 115 - protein, 275 aa, Artificial sequence
  synthetic sequence
GSHSMRYFYTSVSRPGRGEPRFIAVGYVDDTQFVRFDSDAASQRMEPRAPWIEQEGPEYWDQETRNVKAQSQTDRVDLGTLRGYYNQSEDGSHTIQIMYGCDVGPDGRFLRGYRQDAYDGKDYIALNEDLRSWTAADMAAQITKRKWEAAHAAEQQRAYLEGTCVEWLRRYLENGKETLQRTDPPKTHMTHHPISDHEATLRCWALGFYPAEITLTWQRDGEDQTQDTELVETRPAGDGTFQKWAAVVVPSGEEQRYTCHVQHEGLPKPLTLRWE

SEQ ID NO: 116 - protein, 275 aa, Artificial sequence
  synthetic sequence
GSHSMRYFYTSVSRPGRGEPRFIAVGYVDDTQFVRFDSDAASQRMEPRAPWIEQEGPEYWDQETRNVKAQSQTDRVDLGTLRGAYNQSEDGSHTIQIMYGCDVGPDGRFLRGYRQDAYDGKDYIALNEDLRSWTAADMAAQITKRKWEAAHAAEQQRAYLEGTCVEWLRRYLENGKETLQRTDPPKTHMTHHPISDHEATLRCWALGFYPAEITLTWQRDGEDQTQDTELVETRPCGDGTFQKWAAVVVPSGEEQRYTCHVQHEGLPKPLTLRWE

SEQ ID NO: 117 - protein, 341 aa, Artificial sequence
  synthetic sequence
GSHSMRYFSTSVSRPGRGEPRFIAVGYVDDTQFVRFDSDAASQRMEPRAPWIEQEGPEYWDEETGKVKAHSQTDRENLRIALRYYNQSEAGSHTLQMMFGCDVGSDGRFLRGYHQYAYDGKDYIALKEDLRSWTAADMAAQITKRKWEAAHVAEQQRAYLEGTCVDGLRRYLENGKETLQRTDPPKTHMTHHPISDHEATLRCWALGFYPAEITLTWQRDGEDQTQDTELVETRPAGDGTFQKWAAVVVPSGEEQRYTCHVQHEGLPKPLTLRWEPSSQPTVPIVGIIAGLVLLGAVITGAVVAAVMWRRNSSDRKGGSYSQAASSDSAQGSDVSLTACKV

SEQ ID NO: 118 - protein, 341 aa, Artificial sequence
  synthetic sequence
GSHSMRYFTTSVSRPGRGEPRFIAVGYVDDTQFVRFDSDAASQRMEPRAPWIEQEGPEYWDRNTRNVKAHSQIDRVDLGTLRGYYNQSEAGSHTIQMMYGCDVGSDGRFLRGYQQDAYDGKDYIALNEDLRSWTAADMAAQITQRKWEAARVAEQLRAYLEGTCVEWLRRYLENGKETLQRTDPPKTHMTHHAVSDHEATLRCWALSFYPAEITLTWQRDGEDQTQDTELVETRPAGDGTFQKWASVVVPSGQEQRYTCHVQHEGLPKPLTLRWEPSSQPTIPIVGIIAGLVLFGAVFAGAVVAAVRWRRKSSDRKGGSYSQAASSDSAQGSDMSLTACKV

SEQ ID NO: 119 - protein, 276 aa, Artificial sequence [sequence omitted]

SEQ ID NO: 120 - protein, 276 aa, Artificial sequence
  synthetic sequence
GSHSMRYFFTSVSRPGRGEPRFIAVGYVDDTQFVRFDSDAASQRMEPRAPWIEQEGPEYWDGETRKVKAHSQTHRVDLGTLRGCYNQSEAGSHTVQRMYGCDVGSDWRFLRGYHQYAYDGKDYIALKEDLRSWTAADMCAQTTKHKWEAAHVAEQLRAYLEGTCVEWLRRYLENGKETLQRTDAPKTHMTHHAVSDHEATLRCWALSFYPAEITLTWQRDGEDQTQDTELVETRPCGDGTFQKWAAVVVPSGQEQRYTCHVQHEGLPKPLTLRWEP

SEQ ID NO: 121 - protein, 276 aa, Artificial sequence
  synthetic sequence
GSHSMRYFYTSVSRPGRGEPRFISVGYVDDTQFVRFDSDAASPREEPRAPWIEQEGPEYWDRNTQIYKAQAQTDRESLRNLRGAYNQSEAGSHTLQSMYGCDVGPDGRLLRGHDQYAYDGKDYIALNEDLRSWTAADTAAQITQRKWEAAREAEQRRAYLEGECVEWLRRYLENGKDKLERADPPKTHVTHHPISDHEATLRCWALGFYPAEITLTWQRDGEDQTQDTELVETRPCGDRTFQKWAAVVVPSGEEQRYTCHVQHEGLPKPLTLRWEP

SEQ ID NO: 122 - protein, 276 aa, Artificial sequence
  synthetic sequence
GSHSMRYFYTSVSRPGRGEPRFISVGYVDDTQFVRFDSDAASPREEPRAPWIEQEGPEYWDRNTQIYKAQAQTDRESLRNLRGCYNQSEAGSHTLQSMYGCDVGPDGRLLRGHDQYAYDGKDYIALNEDLRSWTAADTCAQITQRKWEAAREAEQRRAYLEGECVEWLRRYLENGKDKLERADPPKTHVTHHPISDHEATLRCWALGFYPAEITLTWQRDGEDQTQDTELVETRPAGDRTFQKWAAVVVPSGEEQRYTCHVQHEGLPKPLTLRWEP

SEQ ID NO: 123 - protein, 276 aa, Artificial sequence; identical to SEQ ID NO: 75
  synthetic sequence

SEQ ID NO: 124 - protein, 276 aa, Artificial sequence
  synthetic sequence
CSHSMRYFDTAVSRPGRGEPRFISVGYVDDTQFVRFDSDAASPRGEPRAPWVEQEGPEYWDRETQNYKRQAQADRVSLRNLRGAYNQSEDGSHTLQRMYGCDLGPDGRLLRGYDQSAYDGKDYIALNEDLRSWTAADTAAQITQRKLEAARAAEQLRAYLEGTCVEWLRRYLENGKETLQRAEPPKTHVTHHPLSDHEATLRCWALGFYPAEITLTWQRDGEDQTQDTELVETRPCGDGTFQKWAAVVVPSGQEQRYTCHMQHEGLQEPLTLSWEP

SEQ ID NO: 125 - protein, 276 aa, Artificial sequence
  synthetic sequence
CSHSMRYFDTAVSRPGRGEPRFISVGYVDDTQFVRFDSDAASPRGEPRAPWVEQEGPEYWDRETQNYKRQAQADRVSLRNLRGCYNQSEDGSHTLQRMYGCDLGPDGRLLRGYDQSAYDGKDYIALNEDLRSWTAADTCAQITQRKLEAARAAEQLRAYLEGTCVEWLRRYLENGKETLQRAEPPKTHVTHHPLSDHEATLRCWALGFYPAEITLTWQRDGEDQTQDTELVETRPAGDGTFQKWAAVVVPSGQEQRYTCHMQHEGLQEPLTLSWEP

SEQ ID NO: 126 - protein, 99 aa, Artificial sequence
  synthetic sequence
IQRTPKIQVYSCHPAENGKSNFLNCYVSGFHPSDIEVDLLKNGERIEKVEHSDLSFSKDWSFYLLYYTEFTPTEKDEYACRVNHVTLSQPKIVKWDRDM

SEQ ID NO: 127 - protein, 246 aa, Artificial sequence
  synthetic sequence
  MISC_FEATURE (78)..(79): 1-5 amino acid residues are present between the residues, wherein the amino acid residues are i) selected independently from any naturally occurring (e.g., encoded) amino acid or ii) any naturally occurring amino acid except proline or glycine
  MISC_FEATURE (79)..(80): 1-5 amino acid residues are present between the residues, wherein the amino acid residues are i) selected independently from any naturally occurring (e.g., encoded) amino acid or ii) any naturally occurring amino acid except proline or glycine
  MISC_FEATURE (123)..(124): 1-5 amino acid residues are present between the residues, wherein the amino acid residues are i) selected independently from any naturally occurring (e.g., encoded) amino acid or ii) any naturally occurring amino acid except proline or glycine
  MISC_FEATURE (124)..(125): 1-5 amino acid residues are present between the residues, wherein the amino acid residues are i) selected independently from any naturally occurring (e.g., encoded) amino acid or ii) any naturally occurring amino acid except proline or glycine
  MISC_FEATURE (210)..(211): 1-5 amino acid residues are present between the residues, wherein the amino acid residues are i) selected independently from any naturally occurring (e.g., encoded) amino acid or ii) any naturally occurring amino acid except proline or glycine
  MISC_FEATURE (211)..(212): 1-5 amino acid residues are present between the residues, wherein the amino acid residues are i) selected independently from any naturally occurring (e.g., encoded) amino acid or ii) any naturally occurring amino acid except proline or glycine
GSHSMRYFFTSVSRPGRGEPRFIAVGYVDDTQFVRFDSDAASQRMEPRAPWIEQEGPEYWDGETRKVKAHSQTHRVDLCAGSHTVQRMYGCDVGSDWRFLRGYHQYAYDGKDYIALKEDLRSWCHKWEAAHVAEQLRAYLEGTCVEWLRRYLENGKETLQRTDAPKTHMTHHAVSDHEATLRCWALSFYPAEITLTWQRDGEDQTQDTELIQKWAAVVVPSGQEQRYTCHVQHEGLPKPLTLRWEP

SEQ ID NO: 128 - protein, 99 aa, Artificial sequence [sequence omitted]

SEQ ID NO: 129 - protein, 99 aa, Artificial sequence; identical to SEQ ID NO: 126
  synthetic sequence

SEQ ID NO: 130 - protein, 276 aa, Artificial sequence [sequence omitted]

SEQ ID NO: 131 - protein, 276 aa, Artificial sequence
  synthetic sequence
GSHSMRYFFTSVSRPGRGEPRFIAVGYVDDTQFVRFDSDAASQRMEPRAPWIEQEGPEYWDGETRKVKAHSQTHRVDLGTLRGYYNQSEAGSHTVQRMYGCDVGSDWRFLRGYHQYAYDGKDYIALKEDLRSWTAADMAAQTTKHKWEAAHVAEQLRAYLEGTCVEWLRRYLENGKETLQRTDAPKTHMTHHAVSDHEATLRCWALSFYPAEITLTWQRDGEDQTQDTELVETRPCGDGTFQKWAAVVVPSGQEQRYTCHVQHEGLPKPLTLRWEP

SEQ ID NO: 132 - protein, 275 aa, Artificial sequence; identical to SEQ ID NO: 46
  synthetic sequence

SEQ ID NO: 133 - protein, 99 aa, Artificial sequence; identical to SEQ ID NO: 126
  synthetic sequence

SEQ ID NO: 134 - protein, 276 aa, Artificial sequence; identical to SEQ ID NO: 131
  synthetic sequence

SEQ ID NO: 135 - protein, 99 aa, Artificial sequence; identical to SEQ ID NO: 126
  synthetic sequence

SEQ ID NO: 136 - protein, 9 aa, Artificial sequence
  synthetic sequence
GCGGSGGGS

SEQ ID NO: 137 - protein, 20 aa, Artificial sequence
  synthetic sequence
GCGGSGGGGSGGGGSGGGGS

SEQ ID NO: 138 - protein, 15 aa, Artificial sequence
  synthetic sequence
GCGGSGGGGSGGGGS

SEQ ID NO: 139 - protein, 5 aa, Artificial sequence
  synthetic sequence
GCGGS

SEQ ID NO: 140 - protein, 10 aa, Artificial sequence
  synthetic sequence
  MISC_FEATURE (6)..(10): The residues may be repated 1, 2, 3, 4, 5, 6, 7, 8, 9, or 10 times
GCGGSGGGGS

SEQ ID NO: 141 - protein, 5 aa, Artificial sequence
  synthetic sequence
CGGGS

SEQ ID NO: 142 - protein, 10 aa, Artificial sequence
  synthetic sequence
  MISC_FEATURE (6)..(10): The residues may be repeated 1,2,3,4,5,6,7,8,9, or 10 times
CGGGSGGGGS

SEQ ID NO: 143 - protein, 276 aa, Artificial sequence
  synthetic sequence
GSHSMRYFFTSVSRPGRGEPRFIAVGYVDDTQFVRFDSDAASQRMEPRAPWIEQEGPEYWDGETRKVKAHSQTHRVDLGTLRGCYNQSEAGSHTVQRMYGCDVGSDWRFLRGYHQYAYDGKDYIALKEDLRSWTAADMAAQTTKHKWEAAHVAEQLRAYLEGTCVEWLRRYLENGKETLQRTDAPKTHMTHHAVSDHEATLRCWALSFYPAEITLTWQRDGEDQTQDTELVETRPCGDGTFQKWAAVVVPSGQEQRYTCHVQHEGLPKPLTLRWEP

SEQ ID NO: 144 - protein, 99 aa, Artificial sequence; identical to SEQ ID NO: 126
  synthetic sequence

SEQ ID NO: 145 - protein, 275 aa, Artificial sequence
  synthetic sequence
GSHSMRYFFTSVSRPGRGEPRFIAVGYVDDTQFVRFDSDAASQKMEPRAPWIEQEGPEYWDQETRNMKAHSQTDRANLGTLRGCYNQSEDGSHTIQIMYGCDVGPDGRFLRGYRQDAYDGKDYIALNEDLRSWTAADMAAQITKRKWEAVHAAEQRRVYLEGRCVDGLRRYLENGKETLQRTDPPKTHMTHHPISDHEATLRCWALGFYPAEITLTWQRDGEDQTQDTELVETRPCGDGTFQKWAAVVVPSGEEQRYTCHVQHEGLPKPLTLRWE

SEQ ID NO: 146 - protein, 276 aa, Artificial sequence; identical to SEQ ID NO: 143
  synthetic sequence

SEQ ID NO: 147 - protein, 275 aa, Artificial sequence
  synthetic sequence
GSHSMRYFFTSVSRPGRGEPRFIAVGYVDDTQFVRFDSDAASQRMEPRAPWIEQEGPEYWDGETRKVKAHSQTHRVDLGTLRGCYNQSEAGSHTVQRMYGCDVGSDWRFLRGYHQYAYDGKDYIALKEDLRSWTAADMAAQTTKHKWEAAHVAEQLRAYLEGTCVEWLRRYLENGKETLQRTDAPKTHMTHHAVSDHEATLRCWALSFYPAEITLTWQRDGEDQTQDTELVETRPCGDGTFQKWAAVVVPSGQEQRYTCHVQHEGLPKPLTLRWE

SEQ ID NO: 148 - protein, 275 aa, Artificial sequence
  synthetic sequence
GSHSMRYFYTSVSRPGRGEPRFIAVGYVDDTQFVRFDSDAASQRMEPRAPWIEQEGPEYWDQETRNVKAQSQTDRVDLGTLRGCYNQSEDGSHTIQIMYGCDVGPDGRFLRGYRQDAYDGKDYIALNEDLRSWTAADMAAQITKRKWEAAHAAEQQRAYLEGRCVEWLRRYLENGKETLQRTDPPKTHMTHHPISDHEATLRCWALGFYPAEITLTWQRDGEDQTQDTELVETRPCGDGTFQKWAAVVVPSGEEQRYTCHVQHEGLPKPLTLRWE

SEQ ID NO: 149 - protein, 275 aa, Artificial sequence
  synthetic sequence
GSHSMRYFSTSVSRPGRGEPRFIAVGYVDDTQFVRFDSDAASQRMEPRAPWIEQEGPEYWDEETGKVKAHSQTDRENLRIALRCYNQSEAGSHTLQMMFGCDVGSDGRFLRGYHQYAYDGKDYIALKEDLRSWTAADMAAQITQRKWEAARVAEQLRAYLEGTCVDGLRRYLENGKETLQRTDPPKTHMTHHPISDHEATLRCWALGFYPAEITLTWQRDGEDQTQDTELVETRPCGDGTFQKWAAVVVPSGEEQRYTCHVQHEGLPKPLTLRWE

SEQ ID NO: 150 - protein, 275 aa, Artificial sequence
  synthetic sequence
GSHSMRYFSTSVSRPGRGEPRFIAVGYVDDTQFVRFDSDAASQRMEPRAPWIEQEGPEYWDEETGKVKAHSQTDRENLRIALRCYNQSEAGSHTLQMMFGCDVGSDGRFLRGYHQYAYDGKDYIALKEDLRSWTAADMAAQITKRKWEAAHVAEQQRAYLEGTCVDGLRRYLENGKETLQRTDPPKTHMTHHPISDHEATLRCWALGFYPAEITLTWQRDGEDQTQDTELVETRPCGDGTFQKWAAVVVPSGEEQRYTCHVQHEGLPKPLTLRWE

SEQ ID NO: 151 - protein, 275 aa, Artificial sequence
  synthetic sequence
GSHSMRYFSTSVSRPGRGEPRFIAVGYVDDTQFVRFDSDAASQRMEPRAPWIEQEGPEYWDEETGKVKAQSQTDRENLRIALRCYNQSEAGSHTLQMMFGCDVGSDGRFLRGYHQYAYDGKDYIALKEDLRSWTAADMAAQITKRKWEAAHVAEQQRAYLEGTCVDGLRRYLENGKETLQRTDPPKTHMTHHPISDHEATLRCWALGFYPAEITLTWQRDGEDQTQDTELVETRPCGDGTFQKWAAVVVPSGEEQRYTCHVQHEGLPKPLTLRWE

SEQ ID NO: 152 - protein, 275 aa, Artificial sequence
  synthetic sequence
GSHSMRYFTTSVSRPGRGEPRFIAVGYVDDTQFVRFDSDAASQRMEPRAPWIEQEGPEYWDRNTRNVKAHSQIDRVDLGTLRGCYNQSEAGSHTIQMMYGCDVGSDGRFLRGYQQDAYDGKDYIALNEDLRSWTAADMAAQITQRKWEAARVAEQLRAYLEGTCVEWLRRYLENGKETLQRTDPPKTHMTHHAVSDHEATLRCWALSFYPAEITLTWQRDGEDQTQDTELVETRPCGDGTFQKWASVVVPSGQEQRYTCHVQHEGLPKPLTLRWE

SEQ ID NO: 153 - protein, 275 aa, Artificial sequence
  synthetic sequence
GSHSMRYFYTSVSRPGRGEPRFIAVGYVDDTQFVRFDSDAASQRMEPRAPWIEQEGPEYWDRNTRKVKAQSQTDRVDLGTLRGCYNQSEDGSHTIQRMYGCDVGPDGRFLRGYQQDAYDGKDYIALNEDLRSWTAADMAAQITQRKWETAHEAEQWRAYLEGTCVEWLRRYLENGKETLQRTDAPKTHMTHHAVSDHEATLRCWALSFYPAEITLTWQRDGEDQTQDTELVETRPCGDGTFQKWASVVVPSGQEQRYTCHVQHEGLPKPLTLRWE

SEQ ID NO: 154 - protein, 276 aa, Artificial sequence
  synthetic sequence
GSHSMRYFYTSVSRPGRGEPRFISVGYVDDTQFVRFDSDAASPREEPRAPWIEQEGPEYWDRNTQIYKAQAQTDRESLRNLRGCYNQSEAGSHTLQSMYGCDVGPDGRLLRGHDQYAYDGKDYIALNEDLRSWTAADTAAQITQRKWEAAREAEQRRAYLEGECVEWLRRYLENGKDKLERADPPKTHVTHHPISDHEATLRCWALGFYPAEITLTWQRDGEDQTQDTELVETRPCGDRTFQKWAAVVVPSGEEQRYTCHVQHEGLPKPLTLRWEP

SEQ ID NO: 155 - protein, 99 aa, Artificial sequence; identical to SEQ ID NO: 126
  synthetic sequence

SEQ ID NO: 156 - protein, 275 aa, Artificial sequence
  synthetic sequence
GSHSMRYFYTSVSRPGRGEPRFISVGYVDDTQFVRFDSDAASPREEPRAPWIEQEGPEYWDRNTQIYKAQAQTDRESLRNLRGCYNQSEAGSHTLQSMYGCDVGPDGRLLRGHDQYAYDGKDYIALNEDLRSWTAADTAAQITQRKWEAAREAEQRRAYLEGECVEWLRRYLENGKDKLERADPPKTHVTHHPISDHEATLRCWALGFYPAEITLTWQRDGEDQTQDTELVETRPCGDRTFQKWAAVVVPSGEEQRYTCHVQHEGLPKPLTLRWE

SEQ ID NO: 157 - protein, 275 aa, Artificial sequence
  synthetic sequence
GSHSMRYFDTAMSRPGRGEPRFISVGYVDDTQFVRFDSDAASPREEPRAPWIEQEGPEYWDRNTQIFKTNTQTDRESLRNLRGCYNQSEAGSHTLQSMYGCDVGPDGRLLRGHNQYAYDGKDYIALNEDLRSWTAADTAAQITQRKWEAARVAEQDRAYLEGTCVEWLRRYLENGKDTLERADPPKTHVTHHPISDHEATLRCWALGFYPAEITLTWQRDGEDQTQDTELVETRPCGDRTFQKWAAVVVPSGEEQRYTCHVQHEGLPKPLTLRWE

SEQ ID NO: 158 - protein, 275 aa, Artificial sequence
  synthetic sequence
GSHSMRYFYTAMSRPGRGEPRFIAVGYVDDTQFVRFDSDAASPRMAPRAPWIEQEGPEYWDRNTQISKTNTQTYRESLRNLRGCYNQSEAGSHIIQRMYGCDVGPDGRLLRGYDQSAYDGKDYIALNEDLSSWTAADTAAQITQRKWEAAREAEQLRAYLEGLCVEWLRRYLENGKETLQRADPPKTHVTHHPISDHEATLRCWALGFYPAEITLTWQRDGEDQTQDTELVETRPCGDRTFQKWAAVVVPSGEEQRYTCHVQHEGLPKPLTLRWE

SEQ ID NO: 159 - protein, 275 aa, Artificial sequence
  synthetic sequence
GSHSMRYFYTSVSRPGRGEPRFISVGYVDDTQFVRFDSDAASPREEPRAPWIEQEGPEYWDRNTQICKTNTQTYRENLRTALRCYNQSEAGSHTLQRMYGCDVGPDGRLLRGHNQFAYDGKDYIALNEDLSSWTAADTAAQITQRKWEAARVAEQLRTYLEGTCVEWLRRYLENGKETLQRADPPKTHVTHHPISDHEATLRCWALGFYPAEITLTWQRDGEDQTQDTELVETRPCGDRTFQKWAAVVVPSGEEQRYTCHVQHEGLPKPLTLRWE

SEQ ID NO: 160 - protein, 275 aa, Artificial sequence
  synthetic sequence
GSHSMRYFHTAMSRPGRGEPRFITVGYVDDTLFVRFDSDATSPRKEPRAPWIEQEGPEYWDRETQISKTNTQTYRESLRNLRGCYNQSEAGSHTLQRMYGCDVGPDGRLLRGHNQYAYDGKDYIALNEDLRSWTAADTAAQISQRKLEAARVAEQLRAYLEGECVEWLRRYLENGKDKLERADPPKTHVTHHPISDHEATLRCWALGFYPAEITLTWQRDGEDQTQDTELVETRPCGDRTFQKWAAVVVPSGEEQRYTCHVQHEGLPKPLTLRWE

SEQ ID NO: 161 - protein, 275 aa, Artificial sequence
  synthetic sequence
GSHSMRYFYTAMSRPGRGEPRFIAVGYVDDTQFVRFDSDAASPRMAPRAPWIEQEGPEYWDRETQKYKRQAQTDRVSLRNLRGCYNQSEAGSHTLQRMYGCDVGPDGRLLRGHDQSAYDGKDYIALNEDLSSWTAADTAAQITQRKWEAAREAEQWRAYLEGLCVEWLRRYLENGKETLQRADPPKTHVTHHPISDHEATLRCWALGFYPAEITLTWQRDGEDQTQDTELVETRPCGDRTFQKWAAVVVPSGEEQRYTCHVQHEGLPKPLTLRWE

SEQ ID NO: 162 - protein, 275 aa, Artificial sequence
  synthetic sequence
GSHSMRYFYTAMSRPGRGEPRFIAVGYVDDTQFVRFDSDAASPRTEPRAPWIEQEGPEYWDRNTQIFKTNTQTYRENLRIALRCYNQSEAGSHIIQRMYGCDLGPDGRLLRGHDQSAYDGKDYIALNEDLSSWTAADTAAQITQRKWEAARVAEQLRAYLEGLCVEWLRRYLENGKETLQRADPPKTHVTHHPVSDHEATLRCWALGFYPAEITLTWQRDGEDQTQDTELVETRPCGDRTFQKWAAVVVPSGEEQRYTCHVQHEGLPKPLTLRWE

SEQ ID NO: 163 - protein, 276 aa, Artificial sequence
  synthetic sequence
CSHSMRYFDTAVSRPGRGEPRFISVGYVDDTQFVRFDSDAASPRGEPRAPWVEQEGPEYWDRETQNYKRQAQADRVSLRNLRGCYNQSEDGSHTLQRMYGCDLGPDGRLLRGYDQSAYDGKDYIALNEDLRSWTAADTAAQITQRKLEAARAAEQLRAYLEGTCVEWLRRYLENGKETLQRAEPPKTHVTHHPLSDHEATLRCWALGFYPAEITLTWQRDGEDQTQDTELVETRPCGDGTFQKWAAVVVPSGQEQRYTCHMQHEGLQEPLTLSWEP

SEQ ID NO: 164 - protein, 99 aa, Artificial sequence; identical to SEQ ID NO: 126
  synthetic sequence

SEQ ID NO: 165 - protein, 276 aa, Artificial sequence
  synthetic sequence
CSHSMKYFFTSVSRPGRGEPRFISVGYVDDTQFVRFDSDAASPRGEPRAPWVEQEGPEYWDRETQKYKRQAQTDRVSLRNLRGCYNQSEAGSHTLQWMCGCDLGPDGRLLRGYDQYAYDGKDYIALNEDLRSWTAADTAAQITQRKWEAAREAEQRRAYLEGTCVEWLRRYLENGKETLQRAEHPKTHVTHHPVSDHEATLRCWALGFYPAEITLTWQWDGEDQTQDTELVETRPCGDGTFQKWAAVMVPSGEEQRYTCHVQHEGLPEPLTLRWEP

SEQ ID NO: 166 - protein, 276 aa, Artificial sequence
  synthetic sequence
GSHSMRYFYTAVSRPGRGEPHFIAVGYVDDTQFVRFDSDAASPRGEPRAPWVEQEGPEYWDRETQKYKRQAQTDRVSLRNLRGCYNQSEARSHIIQRMYGCDVGPDGRLLRGYDQYAYDGKDYIALNEDLRSWTAADTAAQITQRKWEAAREAEQLRAYLEGLCVEWLRRYLKNGKETLQRAEHPKTHVTHHPVSDHEATLRCWALGFYPAEITLTWQWDGEDQTQDTELVETRPCGDGTFQKWAAVVVPSGEEQRYTCHVQHEGLPEPLTLRWEP

SEQ ID NO: 167 - protein, 276 aa, Artificial sequence
  synthetic sequence
GSHSMRYFYTAVSRPGRGEPHFIAVGYVDDTQFVRFDSDAASPRGEPRAPWVEQEGPEYWDRETQKYKRQAQTDRVSLRNLRGCYNQSEAGSHIIQRMYGCDVGPDGRLLRGYDQYAYDGKDYIALNEDLRSWTAADTAAQITQRKWEAAREAEQLRAYLEGLCVEWLRRYLKNGKETLQRAEHPKTHVTHHPVSDHEATLRCWALGFYPAEITLTWQWDGEDQTQDTELVETRPCGDGTFQKWAAVVVPSGEEQRYTCHVQHEGLPEPLTLRWEP

SEQ ID NO: 168 - protein, 276 aa, Artificial sequence
  synthetic sequence
GSHSMRYFSTSVSWPGRGEPRFIAVGYVDDTQFVRFDSDAASPRGEPREPWVEQEGPEYWDRETQKYKRQAQADRVNLRKLRGCYNQSEDGSHTLQRMFGCDLGPDGRLLRGYNQFAYDGKDYIALNEDLRSWTAADTAAQITQRKWEAAREAEQRRAYLEGTCVEWLRRYLENGKETLQRAEHPKTHVTHHPVSDHEATLRCWALGFYPAEITLTWQWDGEDQTQDTELVETRPCGDGTFQKWAAVVVPSGEEQRYTCHVQHEGLPEPLTLRWKP

SEQ ID NO: 169 - protein, 276 aa, Artificial sequence
  synthetic sequence
CSHSMRYFDTAVSRPGRGEPRFISVGYVDDTQFVRFDSDAASPRGEPRAPWVEQEGPEYWDRETQKYKRQAQADRVNLRKLRGCYNQSEDGSHTLQWMYGCDLGPDGRLLRGYDQSAYDGKDYIALNEDLRSWTAADTAAQITQRKWEAAREAEQWRAYLEGTCVEWLRRYLENGKETLQRAEHPKTHVTHHPVSDHEATLRCWALGFYPAEITLTWQRDGEDQTQDTELVETRPCGDGTFQKWAAVVVPSGEEQRYTCHVQHEGLPEPLTLRWEP

SEQ ID NO: 170 - protein, 276 aa, Artificial sequence; identical to SEQ ID NO: 163
  synthetic sequence

SEQ ID NO: 171 - protein, 276 aa, Artificial sequence
  synthetic sequence
CSHSMRYFDTAVSRPGRGEPRFISVGYVDDTQFVRFDSDAASPRGEPRAPWVEQEGPEYWDRETQKYKRQAQADRVSLRNLRGCYNQSEDGSHTLQRMSGCDLGPDGRLLRGYDQSAYDGKDYIALNEDLRSWTAADTAAQITQRKLEAARAAEQLRAYLEGTCVEWLRRYLENGKETLQRAEPPKTHVTHHPLSDHEATLRCWALGFYPAEITLTWQRDGEDQTQDTELVETRPCGDGTFQKWAAVVVPSGQEQRYTCHMQHEGLQEPLTLSWEP

SEQ ID NO: 172 - protein, 276 aa, Artificial sequence
  synthetic sequence
CSHSMRYFYTAVSRPGRGEPRFIAVGYVDDTQFVQFDSDAASPRGEPRAPWVEQEGPEYWDRETQKYKRQAQTDRVSLRNLRGCYNQSEAGSHTLQRMYGCDLGPDGRLLRGYNQFAYDGKDYIALNEDLRSWTAADTAAQITQRKWEAARTAEQLRAYLEGTCVEWLRRYLENGKKTLQRAEHPKTHVTHHPVSDHEATLRCWALGFYPAEITLTWQRDGEDQTQDTELVETRPCGDGTFQKWAAVVVPSGEEQRYTCHVQHEGLPEPLTLRWGP

SEQ ID NO: 173 - protein, 276 aa, Artificial sequence
  synthetic sequence
CSHSMRYFYTAVSRPGRGEPHFIAVGYVDDTQFVRFDSDAASPRGEPRAPWVEQEGPEYWDRETQNYKRQAQTDRVNLRKLRGCYNQSEAGSHIIQRMYGCDLGPDGRLLRGHDQLAYDGKDYIALNEDLRSWTAADTAAQITQRKWEAAREAEQLRAYLEGTCVEWLRRYLENGKETLQRAEHPKTHVTHHPVSDHEATLRCWALGFYPAEITLTWQRDGEDQTQDTELVETRPCGDGTFQKWAAVVVPSGEEQRYTCHVQHEGLPEPLTLRWEP

SEQ ID NO: 174 - protein, 8 aa, Artificial sequence
  synthetic sequence
  misc_feature (1)..(8): Xaa can be any naturally occurring amino acid
XXXXXXXX

SEQ ID NO: 175 - protein, 223 aa, Artificial sequence
  synthetic sequence
PPCPSCPAPEFLGGPSVFLFPPKPKDTLMISRTPEVTCVVVDVSQEDPEVQFNWYVDGVEVHNAKTKPREEQFNSTYRVVSVLTVLHQDWLNGKEYKCKVSNKGLPSSIEKTISKAKGQPREPQVYTLPPSQEEMTKNQVSLTCLVKGFYPSDIAVEWESNGQPENNYKTTPPVLDSDGSFFLYSRLTVDKSRWQEGNVFSCSVMHEALHNHYTQKSLSLSPG

SEQ ID NO: 176 - protein, 9 aa, Artificial sequence
  synthetic sequence
VVGADGVGK

SEQ ID NO: 177 - protein, 9 aa, Artificial sequence
  synthetic sequence
VVGACGVGK

SEQ ID NO: 178 - protein, 9 aa, Artificial sequence
  synthetic sequence
VVGAVGVGK

SEQ ID NO: 179 - protein, 10 aa, Artificial sequence
  synthetic sequence
VVVGADGVGK

SEQ ID NO: 180 - protein, 10 aa, Artificial sequence
  synthetic sequence
VVVGAVGVGK

SEQ ID NO: 181 - protein, 10 aa, Artificial sequence
  synthetic sequence
VVVGACGVGK

SEQ ID NO: 182 - protein, 9 aa, Artificial sequence
  synthetic sequence
VTGADGVGK

SEQ ID NO: 183 - protein, 9 aa, Artificial sequence
  synthetic sequence
VTGAVGVGK

SEQ ID NO: 184 - protein, 9 aa, Artificial sequence
  synthetic sequence
VTGACGVGK

SEQ ID NO: 185 - protein, 10 aa, Artificial sequence
  synthetic sequence
VTVGADGVGK

SEQ ID NO: 186 - protein, 10 aa, Artificial sequence
  synthetic sequence
VTVGAVGVGK

SEQ ID NO: 187 - protein, 10 aa, Artificial sequence
  synthetic sequence
VTVGACGVGK

SEQ ID NO: 188 - protein, 10 aa, Artificial sequence
  synthetic sequence
VVVGAGDVGK

SEQ ID NO: 189 - protein, 9 aa, Artificial sequence
  synthetic sequence
VVGAGDVGK

SEQ ID NO: 190 - protein, 10 aa, Artificial sequence
  synthetic sequence
VVVGARGVGK

SEQ ID NO: 191 - protein, 9 aa, Artificial sequence
  synthetic sequence
VVGARGVGK

SEQ ID NO: 192 - protein, 9 aa, Artificial sequence
  synthetic sequence
LVVVGADGV

SEQ ID NO: 193 - protein, 9 aa, Artificial sequence
  synthetic sequence
LVVVGAVGV

SEQ ID NO: 194 - protein, 9 aa, Artificial sequence
  synthetic sequence
LVVVGACGV

SEQ ID NO: 195 - protein, 10 aa, Artificial sequence
  synthetic sequence
KLVVVGADGV

SEQ ID NO: 196 - protein, 10 aa, Artificial sequence
  synthetic sequence
KLVVVGAVGV

SEQ ID NO: 197 - protein, 10 aa, Artificial sequence
  synthetic sequence
KLVVVGACGV

SEQ ID NO: 198 - protein, 9 aa, Artificial sequence
  synthetic sequence
LLVVGADGV

SEQ ID NO: 199 - protein, 9 aa, Artificial sequence
  synthetic sequence
LLVVGAVGV

SEQ ID NO: 200 - protein, 9 aa, Artificial sequence
  synthetic sequence
LLVVGACGV

SEQ ID NO: 201 - protein, 10 aa, Artificial sequence
  synthetic sequence
FLVVVGADGV

SEQ ID NO: 202 - protein, 10 aa, Artificial sequence
  synthetic sequence
FLVVVGAVGV

SEQ ID NO: 203 - protein, 10 aa, Artificial sequence
  synthetic sequence
FLVVVGACGV

SEQ ID NO: 204 - protein, 10 aa, Artificial sequence
  synthetic sequence
KLVVVGAGDV

SEQ ID NO: 205 - protein, 10 aa, Artificial sequence
  synthetic sequence
KLVVVGARGV

SEQ ID NO: 206 - protein, 10 aa, Artificial sequence
  synthetic sequence
GAGDVGKSAL

SEQ ID NO: 207 - protein, 9 aa, Artificial sequence
  synthetic sequence
AGDVGKSAL

SEQ ID NO: 208 - protein, 9 aa, Artificial sequence
  synthetic sequence
DVGKSALTI

SEQ ID NO: 209 - protein, 10 aa, Artificial sequence
  synthetic sequence
GAVGVGKSAL

SEQ ID NO: 210 - protein, 9 aa, Artificial sequence
  synthetic sequence
AVGVGKSAL

SEQ ID NO: 211 - protein, 9 aa, Artificial sequence
  synthetic sequence
YKLVVVGAV

SEQ ID NO: 212 - protein, 9 aa, Artificial sequence
  synthetic sequence
ARGVGKSAL

SEQ ID NO: 213 - protein, 10 aa, Artificial sequence
  synthetic sequence
GARGVGKSAL

SEQ ID NO: 214 - protein, 10 aa, Artificial sequence
  synthetic sequence
EYKLVVVGAR

SEQ ID NO: 215 - protein, 10 aa, Artificial sequence
  synthetic sequence
RGVGKSALTI

SEQ ID NO: 216 - protein, 9 aa, Artificial sequence
  synthetic sequence
LVVVGARGV

SEQ ID NO: 217 - protein, 10 aa, Artificial sequence
  synthetic sequence
GADGVGKSAL

SEQ ID NO: 218 - protein, 9 aa, Artificial sequence
  synthetic sequence
ACGVGKSAL

SEQ ID NO: 219 - protein, 10 aa, Artificial sequence
  synthetic sequence
GACGVGKSAL

SEQ ID NO: 220 - protein, 9 aa, Artificial sequence
  synthetic sequence
VVGAVGVGK

SEQ ID NO: 221 - protein, 10 aa, Artificial sequence
  synthetic sequence
VVVGAVGVGK

SEQ ID NO: 222 - protein, 9 aa, Artificial sequence
  synthetic sequence
VGAVGVGKS

SEQ ID NO: 223 - protein, 10 aa, Artificial sequence
  synthetic sequence
VGAVGVGKSA

SEQ ID NO: 224 - protein, 9 aa, Artificial sequence
  synthetic sequence
AVGVGKSAL

SEQ ID NO: 225 - protein, 10 aa, Artificial sequence
  synthetic sequence
AVGVGKSALT

SEQ ID NO: 226 - protein, 10 aa, Artificial sequence
  synthetic sequence
GAVGVGKSAL

SEQ ID NO: 227 - protein, 9 aa, Artificial sequence
  synthetic sequence
GAVGVGKSA

SEQ ID NO: 228 - protein, 10 aa, Artificial sequence
  synthetic sequence
LVVVGAVGVG

SEQ ID NO: 229 - protein, 9 aa, Artificial sequence
  synthetic sequence
LVVVGAVGV

SEQ ID NO: 230 - protein, 10 aa, Artificial sequence
  synthetic sequence
KLVVVGAVGV

SEQ ID NO: 231 - protein, 9 aa, Artificial sequence
  synthetic sequence
KLVVVGAVG

SEQ ID NO: 232 - protein, 276 aa, Artificial sequence; identical to SEQ ID NO: 120
  synthetic sequence

SEQ ID NO: 233 - protein, 276 aa, Artificial sequence
  synthetic sequence
GSHSMRYFYTSVSRPGRGEPRFIAVGYVDDTQFVRFDSDAASQRMEPRAPWIEQEGPEYWDQETRNVKAQSQTDRVDLGTLRGCYNQSEDGSHTIQIMYGCDVGPDGRFLRGYRQDAYDGKDYIALNEDLRSWTAADMAAQITKRKWEAAHAAEQQRAYLEGTCVEWLRRYLENGKETLQRTDPPKTHMTHHPISDHEATLRCWALGFYPAEITLTWQRDGEDQTQDTELVETRPCGDGTFQKWAAVVVPSGEEQRYTCHVQHEGLPKPLTLRWEA

SEQ ID NO: 234 - protein, 341 aa, Artificial sequence; identical to SEQ ID NO: 117
  synthetic sequence

SEQ ID NO: 235 - protein, 275 aa, Artificial sequence
  synthetic sequence
GSHSMRYFSTSVSRPGRGEPRFIAVGYVDDTQFVRFDSDAASQRMEPRAPWIEQEGPEYWDEETGKVKAHSQTDRENLRIALRYYNQSEAGSHTLQMMFGCDVGSDGRFLRGYHQYAYDGKDYIALKEDLRSWTAADMAAQITKRKWEAAHVAEQQRAYLEGTCVDGLRRYLENGKETLQRTDPPKTHMTHHPISDHEATLRCWALGFYPAEITLTWQRDGEDQTQDTELVETRPAGDGTFQKWAAVVVPSGEEQRYTCHVQHEGLPKPLTLRWE

SEQ ID NO: 236 - protein, 275 aa, Artificial sequence
  synthetic sequence
GSHSMRYFSTSVSRPGRGEPRFIAVGYVDDTQFVRFDSDAASQRMEPRAPWIEQEGPEYWDEETGKVKAHSQTDRENLRIALRAYNQSEAGSHTLQMMFGCDVGSDGRFLRGYHQYAYDGKDYIALKEDLRSWTAADMAAQITKRKWEAAHVAEQQRAYLEGTCVDGLRRYLENGKETLQRTDPPKTHMTHHPISDHEATLRCWALGFYPAEITLTWQRDGEDQTQDTELVETRPAGDGTFQKWAAVVVPSGEEQRYTCHVQHEGLPKPLTLRWE

SEQ ID NO: 237 - protein, 275 aa, Artificial sequence
  synthetic sequence
GSHSMRYFSTSVSRPGRGEPRFIAVGYVDDTQFVRFDSDAASQRMEPRAPWIEQEGPEYWDEETGKVKAHSQTDRENLRIALRYYNQSEAGSHTLQMMFGCDVGSDGRFLRGYHQYAYDGKDYIALKEDLRSWTAADMAAQITKRKWEAAHVAEQQRAYLEGTCVDGLRRYLENGKETLQRTDPPKTHMTHHPISDHEATLRCWALGFYPAEITLTWQRDGEDQTQDTELVETRPCGDGTFQKWAAVVVPSGEEQRYTCHVQHEGLPKPLTLRWE

SEQ ID NO: 238 - protein, 275 aa, Artificial sequence
  synthetic sequence
GSHSMRYFSTSVSRPGRGEPRFIAVGYVDDTQFVRFDSDAASQRMEPRAPWIEQEGPEYWDEETGKVKAHSQTDRENLRIALRAYNQSEAGSHTLQMMFGCDVGSDGRFLRGYHQYAYDGKDYIALKEDLRSWTAADMAAQITKRKWEAAHVAEQQRAYLEGTCVDGLRRYLENGKETLQRTDPPKTHMTHHPISDHEATLRCWALGFYPAEITLTWQRDGEDQTQDTELVETRPCGDGTFQKWAAVVVPSGEEQRYTCHVQHEGLPKPLTLRWE

SEQ ID NO: 239 - protein, 275 aa, Artificial sequence
  synthetic sequence
GSHSMRYFSTSVSRPGRGEPRFIAVGYVDDTQFVRFDSDAASQRMEPRAPWIEQEGPEYWDEETGKVKAHSQTDRENLRIALRCYNQSEAGSHTLQMMFGCDVGSDGRFLRGYHQYAYDGKDYIALKEDLRSWTAADMAAQITKRKWEAAHVAEQQRAYLEGTCVDGLRRYLENGKETLQRTDPPKTHMTHHPISDHEATLRCWALGFYPAEITLTWQRDGEDQTQDTELVETRPAGDGTFQKWAAVVVPSGEEQRYTCHVQHEGLPKPLTLRWE

SEQ ID NO: 240 - protein, 275 aa, Artificial sequence; identical to SEQ ID NO: 150
  synthetic sequence

SEQ ID NO: 241 - protein, 133 aa, Artificial sequence
  synthetic sequence
APTSSSTKKTQLQLEALLLDLQMILNGINNYKNPKLTRMLTAKFYMPKKATELKHLQCLEEELKPLEEVLNLAQSKNFHLRPRDLISNINVIVLELKGSETTFMCEYADETATIVEFLNRWITFCQSIISTLT

SEQ ID NO: 242 - protein, 10 aa, Artificial sequence
  synthetic sequence
GCGGSGGGGS

SEQ ID NO: 243 - protein, 15 aa, Artificial sequence
  synthetic sequence
GCGGSGGGGSGGGGS

SEQ ID NO: 244 - protein, 20 aa, Artificial sequence
  synthetic sequence
GCGGSGGGGSGGGGSGGGGS

SEQ ID NO: 245 - protein, 25 aa, Artificial sequence
  synthetic sequence
GCGGSGGGGSGGGGSGGGGSGGGGS

SEQ ID NO: 246 - protein, 30 aa, Artificial sequence
  synthetic sequence
GCGGSGGGGSGGGGSGGGGSGGGGSGGGGS

SEQ ID NO: 247 - protein, 35 aa, Artificial sequence
  synthetic sequence
GCGGSGGGGSGGGGSGGGGSGGGGSGGGGSGGGGS

SEQ ID NO: 248 - protein, 40 aa, Artificial sequence
  synthetic sequence
GCGGSGGGGSGGGGSGGGGSGGGGSGGGGSGGGGSGGGGS

SEQ ID NO: 249 - protein, 45 aa, Artificial sequence
  synthetic sequence
GCGGSGGGGSGGGGSGGGGSGGGGSGGGGSGGGGSGGGGSGGGGS

SEQ ID NO: 250 - protein, 50 aa, Artificial sequence
  synthetic sequence
GCGGSGGGGSGGGGSGGGGSGGGGSGGGGSGGGGSGGGGSGGGGSGGGGS

SEQ ID NO: 251 - protein, 55 aa, Artificial sequence
  synthetic sequence
GCGGSGGGGSGGGGSGGGGSGGGGSGGGGSGGGGSGGGGSGGGGSGGGGSGGGGS

SEQ ID NO: 252 - protein, 10 aa, Artificial sequence
  synthetic sequence
  misc_feature (6)..(10): The amino acids may be repeated 1, 2, or 3 times.
GCGGSGGGGS

SEQ ID NO: 253 - protein, 8 aa, Artificial sequence
  synthetic sequence
  misc_feature (1)..(8): Xaa can be any naturally occurring amino acid
XXXXXXXX

SEQ ID NO: 254 - protein, 5 aa, Artificial sequence
  synthetic sequence
  MISC_FEATURE (1)..(5): The residues may be repeated 1, 2, 3, 4, 5, 6, 7, 8, 9, or 10 times.
GGGGS

SEQ ID NO: 255 - protein, 812 aa, Artificial sequence
  synthetic sequence
APTSSSTKKTQLQLEALLLDLQMILNGINNYKNPKLTRMLTAKFYMPKKATELKHLQCLEEELKPLEEVLNLAQSKNFHLRPRDLISNINVIVLELKGSETTFMCEYADETATIVEFLNRWITFCQSIISTLTGGGGSGGGGSGGGGSGGGGSAPTSSSTKKTQLQLEALLLDLQMILNGINNYKNPKLTRMLTAKFYMPKKATELKHLQCLEEELKPLEEVLNLAQSKNFHLRPRDLISNINVIVLELKGSETTFMCEYADETATIVEFLNRWITFCQSIISTLTGGGGSGGGGSGGGGSGGGGSGSHSMRYFFTSVSRPGRGEPRFIAVGYVDDTQFVRFDSDAASQRMEPRAPWIEQEGPEYWDGETRKVKAHSQTHRVDLGTLRGAYNQSEAGSHTVQRMYGCDVGSDWRFLRGYHQYAYDGKDYIALKEDLRSWTAADMAAQTTKHKWEAAHVAEQLRAYLEGTCVEWLRRYLENGKETLQRTDAPKTHMTHHAVSDHEATLRCWALSFYPAEITLTWQRDGEDQTQDTELVETRPCGDGTFQKWAAVVVPSGQEQRYTCHVQHEGLPKPLTLRWEAAAGGDKTHTCPPCPAPEAAGGPSVFLFPPKPKDTLMISRTPEVTCVVVDVSHEDPEVKFNWYVDGVEVHNAKTKPREEQYNSTYRVVSVLTVLHQDWLNGKEYKCKVSNKALPAPIEKTISKAKGQPREPQVYTLPPSREEMTKNQVSLTCLVKGFYPSDIAVEWESNGQPENNYKTTPPVLDSDGSFFLYSKLTVDKSRWQQGNVFSCSVMHEALHNHYTQKSLSLSPG

SEQ ID NO: 256 - protein, 812 aa, Artificial sequence
  synthetic sequence
APTSSSTKKTQLQLEALLLDLQMILNGINNYKNPKLTRMLTAKFYMPKKATELKHLQCLEEELKPLEEVLNLAQSKNFHLRPRDLISNINVIVLELKGSETTFMCEYADETATIVEFLNRWITFCQSIISTLTGGGGSGGGGSGGGGSGGGGSAPTSSSTKKTQLQLEALLLDLQMILNGINNYKNPKLTRMLTAKFYMPKKATELKHLQCLEEELKPLEEVLNLAQSKNFHLRPRDLISNINVIVLELKGSETTFMCEYADETATIVEFLNRWITFCQSIISTLTGGGGSGGGGSGGGGSGGGGSGSHSMRYFFTSVSRPGRGEPRFIAVGYVDDTQFVRFDSDAASQRMEPRAPWIEQEGPEYWDGETRKVKAHSQTHRVDLGTLRGCYNQSEAGSHTVQRMYGCDVGSDWRFLRGYHQYAYDGKDYIALKEDLRSWTAADMAAQTTKHKWEAAHVAEQLRAYLEGTCVEWLRRYLENGKETLQRTDAPKTHMTHHAVSDHEATLRCWALSFYPAEITLTWQRDGEDQTQDTELVETRPCGDGTFQKWAAVVVPSGQEQRYTCHVQHEGLPKPLTLRWEAAAGGDKTHTCPPCPAPEAAGGPSVFLFPPKPKDTLMISRTPEVTCVVVDVSHEDPEVKFNWYVDGVEVHNAKTKPREEQYNSTYRVVSVLTVLHQDWLNGKEYKCKVSNKALPAPIEKTISKAKGQPREPQVYTLPPSREEMTKNQVSLTCLVKGFYPSDIAVEWESNGQPENNYKTTPPVLDSDGSFFLYSKLTVDKSRWQQGNVFSCSVMHEALHNHYTQKSLSLSPG

SEQ ID NO: 257 - protein, 812 aa, Artificial sequence
  synthetic sequence
APTSSSTKKTQLQLEALLLDLQMILNGINNYKNPKLTRMLTAKFYMPKKATELKHLQCLEEELKPLEEVLNLAQSKNFHLRPRDLISNINVIVLELKGSETTFMCEYADETATIVEFLNRWITFCQSIISTLTGGGGSGGGGSGGGGSGGGGSAPTSSSTKKTQLQLEALLLDLQMILNGINNYKNPKLTRMLTAKFYMPKKATELKHLQCLEEELKPLEEVLNLAQSKNFHLRPRDLISNINVIVLELKGSETTFMCEYADETATIVEFLNRWITFCQSIISTLTGGGGSGGGGSGGGGSGGGGSGSHSMRYFFTSVSRPGRGEPRFIAVGYVDDTQFVRFDSDAASQRMEPRAPWIEQEGPEYWDGETRKVKAHSQTHRVDLGTLRGCYNQSEAGSHTVQRMYGCDVGSDWRFLRGYHQYAYDGKDYIALKEDLRSWTAADMAAQTTKHKWEAAHVAEQLRAYLEGTCVEWLRRYLENGKETLQRTDAPKTHMTHHAVSDHEATLRCWALSFYPAEITLTWQRDGEDQTQDTELVETRPAGDGTFQKWAAVVVPSGQEQRYTCHVQHEGLPKPLTLRWEAAAGGDKTHTCPPCPAPEAAGGPSVFLFPPKPKDTLMISRTPEVTCVVVDVSHEDPEVKFNWYVDGVEVHNAKTKPREEQYNSTYRVVSVLTVLHQDWLNGKEYKCKVSNKALPAPIEKTISKAKGQPREPQVYTLPPSREEMTKNQVSLTCLVKGFYPSDIAVEWESNGQPENNYKTTPPVLDSDGSFFLYSKLTVDKSRWQQGNVFSCSVMHEALHNHYTQKSLSLSPG

SEQ ID NO: 258 - protein, 812 aa, Artificial sequence
  synthetic sequence
APTSSSTKKTQLQLEALLLDLQMILNGINNYKNPKLTRMLTAKFYMPKKATELKHLQCLEEELKPLEEVLNLAQSKNFHLRPRDLISNINVIVLELKGSETTFMCEYADETATIVEFLNRWITFCQSIISTLTGGGGSGGGGSGGGGSGGGGSAPTSSSTKKTQLQLEALLLDLQMILNGINNYKNPKLTRMLTAKFYMPKKATELKHLQCLEEELKPLEEVLNLAQSKNFHLRPRDLISNINVIVLELKGSETTFMCEYADETATIVEFLNRWITFCQSIISTLTGGGGSGGGGSGGGGSGGGGSGSHSMRYFYTSVSRPGRGEPRFIAVGYVDDTQFVRFDSDAASQRMEPRAPWIEQEGPEYWDQETRNVKAQSQTDRVDLGTLRGAYNQSEDGSHTIQIMYGCDVGPDGRFLRGYRQDAYDGKDYIALNEDLRSWTAADMAAQITKRKWEAAHAAEQQRAYLEGTCVEWLRRYLENGKETLQRTDPPKTHMTHHPISDHEATLRCWALGFYPAEITLTWQRDGEDQTQDTELVETRPCGDGTFQKWAAVVVPSGEEQRYTCHVQHEGLPKPLTLRWEAAAGGDKTHTCPPCPAPEAAGGPSVFLFPPKPKDTLMISRTPEVTCVVVDVSHEDPEVKFNWYVDGVEVHNAKTKPREEQYNSTYRVVSVLTVLHQDWLNGKEYKCKVSNKALPAPIEKTISKAKGQPREPQVYTLPPSREEMTKNQVSLTCLVKGFYPSDIAVEWESNGQPENNYKTTPPVLDSDGSFFLYSKLTVDKSRWQQGNVFSCSVMHEALHNHYTQKSLSLSPG

SEQ ID NO: 259 - protein, 812 aa, Artificial sequence
  synthetic sequence
APTSSSTKKTQLQLEALLLDLQMILNGINNYKNPKLTRMLTAKFYMPKKATELKHLQCLEEELKPLEEVLNLAQSKNFHLRPRDLISNINVIVLELKGSETTFMCEYADETATIVEFLNRWITFCQSIISTLTGGGGSGGGGSGGGGSGGGGSAPTSSSTKKTQLQLEALLLDLQMILNGINNYKNPKLTRMLTAKFYMPKKATELKHLQCLEEELKPLEEVLNLAQSKNFHLRPRDLISNINVIVLELKGSETTFMCEYADETATIVEFLNRWITFCQSIISTLTGGGGSGGGGSGGGGSGGGGSGSHSMRYFYTSVSRPGRGEPRFIAVGYVDDTQFVRFDSDAASQRMEPRAPWIEQEGPEYWDQETRNVKAQSQTDRVDLGTLRGCYNQSEDGSHTIQIMYGCDVGPDGRFLRGYRQDAYDGKDYIALNEDLRSWTAADMAAQITKRKWEAAHAAEQQRAYLEGRCVEWLRRYLENGKETLQRTDPPKTHMTHHPISDHEATLRCWALGFYPAEITLTWQRDGEDQTQDTELVETRPCGDGTFQKWAAVVVPSGEEQRYTCHVQHEGLPKPLTLRWEAAAGGDKTHTCPPCPAPEAAGGPSVFLFPPKPKDTLMISRTPEVTCVVVDVSHEDPEVKFNWYVDGVEVHNAKTKPREEQYNSTYRVVSVLTVLHQDWLNGKEYKCKVSNKALPAPIEKTISKAKGQPREPQVYTLPPSREEMTKNQVSLTCLVKGFYPSDIAVEWESNGQPENNYKTTPPVLDSDGSFFLYSKLTVDKSRWQQGNVFSCSVMHEALHNHYTQKSLSLSPG

SEQ ID NO: 260 - protein, 812 aa, Artificial sequence
  synthetic sequence
APTSSSTKKTQLQLEALLLDLQMILNGINNYKNPKLTRMLTAKFYMPKKATELKHLQCLEEELKPLEEVLNLAQSKNFHLRPRDLISNINVIVLELKGSETTFMCEYADETATIVEFLNRWITFCQSIISTLTGGGGSGGGGSGGGGSGGGGSAPTSSSTKKTQLQLEALLLDLQMILNGINNYKNPKLTRMLTAKFYMPKKATELKHLQCLEEELKPLEEVLNLAQSKNFHLRPRDLISNINVIVLELKGSETTFMCEYADETATIVEFLNRWITFCQSIISTLTGGGGSGGGGSGGGGSGGGGSGSHSMRYFYTSVSRPGRGEPRFIAVGYVDDTQFVRFDSDAASQRMEPRAPWIEQEGPEYWDQETRNVKAQSQTDRVDLGTLRGCYNQSEDGSHTIQIMYGCDVGPDGRFLRGYRQDAYDGKDYIALNEDLRSWTAADMAAQITKRKWEAAHAAEQQRAYLEGRCVEWLRRYLENGKETLQRTDPPKTHMTHHPISDHEATLRCWALGFYPAEITLTWQRDGEDQTQDTELVETRPAGDGTFQKWAAVVVPSGEEQRYTCHVQHEGLPKPLTLRWEAAAGGDKTHTCPPCPAPEAAGGPSVFLFPPKPKDTLMISRTPEVTCVVVDVSHEDPEVKFNWYVDGVEVHNAKTKPREEQYNSTYRVVSVLTVLHQDWLNGKEYKCKVSNKALPAPIEKTISKAKGQPREPQVYTLPPSREEMTKNQVSLTCLVKGFYPSDIAVEWESNGQPENNYKTTPPVLDSDGSFFLYSKLTVDKSRWQQGNVFSCSVMHEALHNHYTQKSLSLSPG

SEQ ID NO: 261 - protein, 123 aa, Artificial sequence
  synthetic sequence
VVGADGVGKGGGGSGGGGSGGGGSIQRTPKIQVYSCHPAENGKSNFLNCYVSGFHPSDIEVDLLKNGERIEKVEHSDLSFSKDWSFYLLYYTEFTPTEKDEYACRVNHVTLSQPKIVKWDRDM

SEQ ID NO: 262 - protein, 123 aa, Artificial sequence
  synthetic sequence
VVGADGVGKGCGGSGGGGSGGGGSIQRTPKIQVYSCHPAENGKSNFLNCYVSGFHPSDIEVDLLKNGERIEKVEHSDLSFSKDWSFYLLYYTEFTPTEKDEYACRVNHVTLSQPKIVKWDRDM

SEQ ID NO: 263 - protein, 123 aa, Artificial sequence
  synthetic sequence
VVGADGVGKGCGGSGGGGSGGGGSIQRTPKIQVYSRHPAENGKSNFLNCYVSGFHPSDIEVDLLKNGERIEKVEHSDLSFSKDWSFYLLYYTEFTPTEKDEYACRVNHVTLSQPKIVKWDRDM

SEQ ID NO: 264 - protein, 123 aa, Artificial sequence
  synthetic sequence
VVGACGVGKGGGGSGGGGSGGGGSIQRTPKIQVYSCHPAENGKSNFLNCYVSGFHPSDIEVDLLKNGERIEKVEHSDLSFSKDWSFYLLYYTEFTPTEKDEYACRVNHVTLSQPKIVKWDRDM

SEQ ID NO: 265 - protein, 123 aa, Artificial sequence
  synthetic sequence
VVGACGVGKGCGGSGGGGSGGGGSIQRTPKIQVYSCHPAENGKSNFLNCYVSGFHPSDIEVDLLKNGERIEKVEHSDLSFSKDWSFYLLYYTEFTPTEKDEYACRVNHVTLSQPKIVKWDRDM

SEQ ID NO: 266 - protein, 123 aa, Artificial sequence
  synthetic sequence
VVGACGVGKGCGGSGGGGSGGGGSIQRTPKIQVYSRHPAENGKSNFLNCYVSGFHPSDIEVDLLKNGERIEKVEHSDLSFSKDWSFYLLYYTEFTPTEKDEYACRVNHVTLSQPKIVKWDRDM

SEQ ID NO: 267 - protein, 123 aa, Artificial sequence
  synthetic sequence
VVGAVGVGKGGGGSGGGGSGGGGSIQRTPKIQVYSCHPAENGKSNFLNCYVSGFHPSDIEVDLLKNGERIEKVEHSDLSFSKDWSFYLLYYTEFTPTEKDEYACRVNHVTLSQPKIVKWDRDM

SEQ ID NO: 268 - protein, 123 aa, Artificial sequence
  synthetic sequence
VVGAVGVGKGCGGSGGGGSGGGGSIQRTPKIQVYSCHPAENGKSNFLNCYVSGFHPSDIEVDLLKNGERIEKVEHSDLSFSKDWSFYLLYYTEFTPTEKDEYACRVNHVTLSQPKIVKWDRDM

SEQ ID NO: 269 - protein, 123 aa, Artificial sequence
  synthetic sequence
VVGAVGVGKGCGGSGGGGSGGGGSIQRTPKIQVYSRHPAENGKSNFLNCYVSGFHPSDIEVDLLKNGERIEKVEHSDLSFSKDWSFYLLYYTEFTPTEKDEYACRVNHVTLSQPKIVKWDRDM

SEQ ID NO: 270 - protein, 124 aa, Artificial sequence
  synthetic sequence
VVVGADGVGKGGGGSGGGGSGGGGSIQRTPKIQVYSCHPAENGKSNFLNCYVSGFHPSDIEVDLLKNGERIEKVEHSDLSFSKDWSFYLLYYTEFTPTEKDEYACRVNHVTLSQPKIVKWDRDM

SEQ ID NO: 271 - protein, 124 aa, Artificial sequence
  synthetic sequence
VVVGADGVGKGCGGSGGGGSGGGGSIQRTPKIQVYSCHPAENGKSNFLNCYVSGFHPSDIEVDLLKNGERIEKVEHSDLSFSKDWSFYLLYYTEFTPTEKDEYACRVNHVTLSQPKIVKWDRDM

SEQ ID NO: 272 - protein, 124 aa, Artificial sequence
  synthetic sequence
VVVGADGVGKGCGGSGGGGSGGGGSIQRTPKIQVYSRHPAENGKSNFLNCYVSGFHPSDIEVDLLKNGERIEKVEHSDLSFSKDWSFYLLYYTEFTPTEKDEYACRVNHVTLSQPKIVKWDRDM

SEQ ID NO: 273 - protein, 124 aa, Artificial sequence
  synthetic sequence
VVVGACGVGKGGGGSGGGGSGGGGSIQRTPKIQVYSCHPAENGKSNFLNCYVSGFHPSDIEVDLLKNGERIEKVEHSDLSFSKDWSFYLLYYTEFTPTEKDEYACRVNHVTLSQPKIVKWDRDM

SEQ ID NO: 274 - protein, 124 aa, Artificial sequence
  synthetic sequence
VVVGACGVGKGCGGSGGGGSGGGGSIQRTPKIQVYSCHPAENGKSNFLNCYVSGFHPSDIEVDLLKNGERIEKVEHSDLSFSKDWSFYLLYYTEFTPTEKDEYACRVNHVTLSQPKIVKWDRDM

SEQ ID NO: 275 - protein, 124 aa, Artificial sequence
  synthetic sequence
VVVGACGVGKGCGGSGGGGSGGGGSIQRTPKIQVYSRHPAENGKSNFLNCYVSGFHPSDIEVDLLKNGERIEKVEHSDLSFSKDWSFYLLYYTEFTPTEKDEYACRVNHVTLSQPKIVKWDRDM

SEQ ID NO: 276 - protein, 124 aa, Artificial sequence
  synthetic sequence
VVVGAVGVGKGGGGSGGGGSGGGGSIQRTPKIQVYSCHPAENGKSNFLNCYVSGFHPSDIEVDLLKNGERIEKVEHSDLSFSKDWSFYLLYYTEFTPTEKDEYACRVNHVTLSQPKIVKWDRDM

SEQ ID NO: 277 - protein, 124 aa, Artificial sequence
  synthetic sequence
VVVGAVGVGKGCGGSGGGGSGGGGSIQRTPKIQVYSCHPAENGKSNFLNCYVSGFHPSDIEVDLLKNGERIEKVEHSDLSFSKDWSFYLLYYTEFTPTEKDEYACRVNHVTLSQPKIVKWDRDM

SEQ ID NO: 278 - protein, 124 aa, Artificial sequence
  synthetic sequence
VVVGAVGVGKGCGGSGGGGSGGGGSIQRTPKIQVYSRHPAENGKSNFLNCYVSGFHPSDIEVDLLKNGERIEKVEHSDLSFSKDWSFYLLYYTEFTPTEKDEYACRVNHVTLSQPKIVKWDRDM

SEQ ID NO: 279 - protein, 123 aa, Artificial sequence
  synthetic sequence
VTGADGVGKGGGGSGGGGSGGGGSIQRTPKIQVYSCHPAENGKSNFLNCYVSGFHPSDIEVDLLKNGERIEKVEHSDLSFSKDWSFYLLYYTEFTPTEKDEYACRVNHVTLSQPKIVKWDRDM

SEQ ID NO: 280 - protein, 123 aa, Artificial sequence
  synthetic sequence
VTGADGVGKGCGGSGGGGSGGGGSIQRTPKIQVYSCHPAENGKSNFLNCYVSGFHPSDIEVDLLKNGERIEKVEHSDLSFSKDWSFYLLYYTEFTPTEKDEYACRVNHVTLSQPKIVKWDRDM

SEQ ID NO: 281 - protein, 123 aa, Artificial sequence
  synthetic sequence
VTGADGVGKGCGGSGGGGSGGGGSIQRTPKIQVYSRHPAENGKSNFLNCYVSGFHPSDIEVDLLKNGERIEKVEHSDLSFSKDWSFYLLYYTEFTPTEKDEYACRVNHVTLSQPKIVKWDRDM

SEQ ID NO: 282 - protein, 123 aa, Artificial sequence
  synthetic sequence
VTGACGVGKGGGGSGGGGSGGGGSIQRTPKIQVYSCHPAENGKSNFLNCYVSGFHPSDIEVDLLKNGERIEKVEHSDLSFSKDWSFYLLYYTEFTPTEKDEYACRVNHVTLSQPKIVKWDRDM

SEQ ID NO: 283 - protein, 123 aa, Artificial sequence
  synthetic sequence
VTGACGVGKGCGGSGGGGSGGGGSIQRTPKIQVYSCHPAENGKSNFLNCYVSGFHPSDIEVDLLKNGERIEKVEHSDLSFSKDWSFYLLYYTEFTPTEKDEYACRVNHVTLSQPKIVKWDRDM

SEQ ID NO: 284 - protein, 123 aa, Artificial sequence
  synthetic sequence
VTGACGVGKGCGGSGGGGSGGGGSIQRTPKIQVYSRHPAENGKSNFLNCYVSGFHPSDIEVDLLKNGERIEKVEHSDLSFSKDWSFYLLYYTEFTPTEKDEYACRVNHVTLSQPKIVKWDRDM

SEQ ID NO: 285 - protein, 123 aa, Artificial sequence
  synthetic sequence
VTGAVGVGKGGGGSGGGGSGGGGSIQRTPKIQVYSCHPAENGKSNFLNCYVSGFHPSDIEVDLLKNGERIEKVEHSDLSFSKDWSFYLLYYTEFTPTEKDEYACRVNHVTLSQPKIVKWDRDM

SEQ ID NO: 286 - protein, 123 aa, Artificial sequence
  synthetic sequence
VTGAVGVGKGCGGSGGGGSGGGGSIQRTPKIQVYSCHPAENGKSNFLNCYVSGFHPSDIEVDLLKNGERIEKVEHSDLSFSKDWSFYLLYYTEFTPTEKDEYACRVNHVTLSQPKIVKWDRDM

SEQ ID NO: 287 - protein, 123 aa, Artificial sequence
  synthetic sequence
VTGAVGVGKGCGGSGGGGSGGGGSIQRTPKIQVYSRHPAENGKSNFLNCYVSGFHPSDIEVDLLKNGERIEKVEHSDLSFSKDWSFYLLYYTEFTPTEKDEYACRVNHVTLSQPKIVKWDRDM

SEQ ID NO: 288 - protein, 124 aa, Artificial sequence
  synthetic sequence
VTVGADGVGKGGGGSGGGGSGGGGSIQRTPKIQVYSCHPAENGKSNFLNCYVSGFHPSDIEVDLLKNGERIEKVEHSDLSFSKDWSFYLLYYTEFTPTEKDEYACRVNHVTLSQPKIVKWDRDM

SEQ ID NO: 289 - protein, 124 aa, Artificial sequence
  synthetic sequence
VTVGADGVGKGCGGSGGGGSGGGGSIQRTPKIQVYSCHPAENGKSNFLNCYVSGFHPSDIEVDLLKNGERIEKVEHSDLSFSKDWSFYLLYYTEFTPTEKDEYACRVNHVTLSQPKIVKWDRDM

SEQ ID NO: 290 - protein, 124 aa, Artificial sequence
  synthetic sequence
VTVGADGVGKGCGGSGGGGSGGGGSIQRTPKIQVYSRHPAENGKSNFLNCYVSGFHPSDIEVDLLKNGERIEKVEHSDLSFSKDWSFYLLYYTEFTPTEKDEYACRVNHVTLSQPKIVKWDRDM

SEQ ID NO: 291 - protein, 124 aa, Artificial sequence
  synthetic sequence
VTVGACGVGKGGGGSGGGGSGGGGSIQRTPKIQVYSCHPAENGKSNFLNCYVSGFHPSDIEVDLLKNGERIEKVEHSDLSFSKDWSFYLLYYTEFTPTEKDEYACRVNHVTLSQPKIVKWDRDM

SEQ ID NO: 292 - protein, 124 aa, Artificial sequence
  synthetic sequence
VTVGACGVGKGCGGSGGGGSGGGGSIQRTPKIQVYSCHPAENGKSNFLNCYVSGFHPSDIEVDLLKNGERIEKVEHSDLSFSKDWSFYLLYYTEFTPTEKDEYACRVNHVTLSQPKIVKWDRDM

SEQ ID NO: 293 - protein, 124 aa, Artificial sequence
  synthetic sequence
VTVGACGVGKGCGGSGGGGSGGGGSIQRTPKIQVYSRHPAENGKSNFLNCYVSGFHPSDIEVDLLKNGERIEKVEHSDLSFSKDWSFYLLYYTEFTPTEKDEYACRVNHVTLSQPKIVKWDRDM

SEQ ID NO: 294 - protein, 124 aa, Artificial sequence
  synthetic sequence
VTVGAVGVGKGGGGSGGGGSGGGGSIQRTPKIQVYSCHPAENGKSNFLNCYVSGFHPSDIEVDLLKNGERIEKVEHSDLSFSKDWSFYLLYYTEFTPTEKDEYACRVNHVTLSQPKIVKWDRDM

SEQ ID NO: 295 - protein, 124 aa, Artificial sequence
  synthetic sequence
VTVGAVGVGKGCGGSGGGGSGGGGSIQRTPKIQVYSCHPAENGKSNFLNCYVSGFHPSDIEVDLLKNGERIEKVEHSDLSFSKDWSFYLLYYTEFTPTEKDEYACRVNHVTLSQPKIVKWDRDM

SEQ ID NO: 296 - protein, 124 aa, Artificial sequence
  synthetic sequence
VTVGAVGVGKGCGGSGGGGSGGGGSIQRTPKIQVYSRHPAENGKSNFLNCYVSGFHPSDIEVDLLKNGERIEKVEHSDLSFSKDWSFYLLYYTEFTPTEKDEYACRVNHVTLSQPKIVKWDRDM

SEQ ID NO: 297 - protein, 123 aa, Artificial sequence
  synthetic sequence
LVVVGADGVGGGGSGGGGSGGGGSIQRTPKIQVYSCHPAENGKSNFLNCYVSGFHPSDIEVDLLKNGERIEKVEHSDLSFSKDWSFYLLYYTEFTPTEKDEYACRVNHVTLSQPKIVKWDRDM

SEQ ID NO: 298 - protein, 123 aa, Artificial sequence
  synthetic sequence
LVVVGADGVGCGGSGGGGSGGGGSIQRTPKIQVYSCHPAENGKSNFLNCYVSGFHPSDIEVDLLKNGERIEKVEHSDLSFSKDWSFYLLYYTEFTPTEKDEYACRVNHVTLSQPKIVKWDRDM

SEQ ID NO: 299 - protein, 123 aa, Artificial sequence
  synthetic sequence
LVVVGADGVGCGGSGGGGSGGGGSIQRTPKIQVYSRHPAENGKSNFLNCYVSGFHPSDIEVDLLKNGERIEKVEHSDLSFSKDWSFYLLYYTEFTPTEKDEYACRVNHVTLSQPKIVKWDRDM

SEQ ID NO: 300 - protein, 123 aa, Artificial sequence
  synthetic sequence
LVVVGAVGVGGGGSGGGGSGGGGSIQRTPKIQVYSCHPAENGKSNFLNCYVSGFHPSDIEVDLLKNGERIEKVEHSDLSFSKDWSFYLLYYTEFTPTEKDEYACRVNHVTLSQPKIVKWDRDM

SEQ ID NO: 301 - protein, 123 aa, Artificial sequence
  synthetic sequence
LVVVGAVGVGCGGSGGGGSGGGGSIQRTPKIQVYSCHPAENGKSNFLNCYVSGFHPSDIEVDLLKNGERIEKVEHSDLSFSKDWSFYLLYYTEFTPTEKDEYACRVNHVTLSQPKIVKWDRDM

SEQ ID NO: 302 - protein, 123 aa, Artificial sequence
  synthetic sequence
LVVVGAVGVGCGGSGGGGSGGGGSIQRTPKIQVYSRHPAENGKSNFLNCYVSGFHPSDIEVDLLKNGERIEKVEHSDLSFSKDWSFYLLYYTEFTPTEKDEYACRVNHVTLSQPKIVKWDRDM

SEQ ID NO: 303 - protein, 123 aa, Artificial sequence
  synthetic sequence
LVVVGACGVGGGGSGGGGSGGGGSIQRTPKIQVYSCHPAENGKSNFLNCYVSGFHPSDIEVDLLKNGERIEKVEHSDLSFSKDWSFYLLYYTEFTPTEKDEYACRVNHVTLSQPKIVKWDRDM

SEQ ID NO: 304 - protein, 123 aa, Artificial sequence
  synthetic sequence
LVVVGACGVGCGGSGGGGSGGGGSIQRTPKIQVYSCHPAENGKSNFLNCYVSGFHPSDIEVDLLKNGERIEKVEHSDLSFSKDWSFYLLYYTEFTPTEKDEYACRVNHVTLSQPKIVKWDRDM

SEQ ID NO: 305 - protein, 123 aa, Artificial sequence
  synthetic sequence
LVVVGACGVGCGGSGGGGSGGGGSIQRTPKIQVYSRHPAENGKSNFLNCYVSGFHPSDIEVDLLKNGERIEKVEHSDLSFSKDWSFYLLYYTEFTPTEKDEYACRVNHVTLSQPKIVKWDRDM

SEQ ID NO: 306 - protein, 124 aa, Artificial sequence
  synthetic sequence
KLVVVGADGVGGGGSGGGGSGGGGSIQRTPKIQVYSCHPAENGKSNFLNCYVSGFHPSDIEVDLLKNGERIEKVEHSDLSFSKDWSFYLLYYTEFTPTEKDEYACRVNHVTLSQPKIVKWDRDM

SEQ ID NO: 307 - protein, 124 aa, Artificial sequence
  synthetic sequence
KLVVVGADGVGCGGSGGGGSGGGGSIQRTPKIQVYSCHPAENGKSNFLNCYVSGFHPSDIEVDLLKNGERIEKVEHSDLSFSKDWSFYLLYYTEFTPTEKDEYACRVNHVTLSQPKIVKWDRDM

SEQ ID NO: 308 - protein, 124 aa, Artificial sequence
  synthetic sequence
KLVVVGADGVGCGGSGGGGSGGGGSIQRTPKIQVYSRHPAENGKSNFLNCYVSGFHPSDIEVDLLKNGERIEKVEHSDLSFSKDWSFYLLYYTEFTPTEKDEYACRVNHVTLSQPKIVKWDRDM

SEQ ID NO: 309 - protein, 124 aa, Artificial sequence
  synthetic sequence
KLVVVGAVGVGGGGSGGGGSGGGGSIQRTPKIQVYSCHPAENGKSNFLNCYVSGFHPSDIEVDLLKNGERIEKVEHSDLSFSKDWSFYLLYYTEFTPTEKDEYACRVNHVTLSQPKIVKWDRDM

SEQ ID NO: 310 - protein, 124 aa, Artificial sequence
  synthetic sequence
KLVVVGAVGVGCGGSGGGGSGGGGSIQRTPKIQVYSCHPAENGKSNFLNCYVSGFHPSDIEVDLLKNGERIEKVEHSDLSFSKDWSFYLLYYTEFTPTEKDEYACRVNHVTLSQPKIVKWDRDM

SEQ ID NO: 311 - protein, 124 aa, Artificial sequence
  synthetic sequence
KLVVVGAVGVGCGGSGGGGSGGGGSIQRTPKIQVYSRHPAENGKSNFLNCYVSGFHPSDIEVDLLKNGERIEKVEHSDLSFSKDWSFYLLYYTEFTPTEKDEYACRVNHVTLSQPKIVKWDRDM

SEQ ID NO: 312 - protein, 124 aa, Artificial sequence
  synthetic sequence
KLVVVGACGVGGGGSGGGGSGGGGSIQRTPKIQVYSCHPAENGKSNFLNCYVSGFHPSDIEVDLLKNGERIEKVEHSDLSFSKDWSFYLLYYTEFTPTEKDEYACRVNHVTLSQPKIVKWDRDM

SEQ ID NO: 313 - protein, 124 aa, Artificial sequence
  synthetic sequence
KLVVVGACGVGCGGSGGGGSGGGGSIQRTPKIQVYSCHPAENGKSNFLNCYVSGFHPSDIEVDLLKNGERIEKVEHSDLSFSKDWSFYLLYYTEFTPTEKDEYACRVNHVTLSQPKIVKWDRDM

SEQ ID NO: 314 - protein, 124 aa, Artificial sequence
  synthetic sequence
KLVVVGACGVGCGGSGGGGSGGGGSIQRTPKIQVYSRHPAENGKSNFLNCYVSGFHPSDIEVDLLKNGERIEKVEHSDLSFSKDWSFYLLYYTEFTPTEKDEYACRVNHVTLSQPKIVKWDRDM

SEQ ID NO: 315 - protein, 123 aa, Artificial sequence
  synthetic sequence
LLVVGADGVGGGGSGGGGSGGGGSIQRTPKIQVYSCHPAENGKSNFLNCYVSGFHPSDIEVDLLKNGERIEKVEHSDLSFSKDWSFYLLYYTEFTPTEKDEYACRVNHVTLSQPKIVKWDRDM

SEQ ID NO: 316 - protein, 123 aa, Artificial sequence
  synthetic sequence
LLVVGADGVGCGGSGGGGSGGGGSIQRTPKIQVYSCHPAENGKSNFLNCYVSGFHPSDIEVDLLKNGERIEKVEHSDLSFSKDWSFYLLYYTEFTPTEKDEYACRVNHVTLSQPKIVKWDRDM

SEQ ID NO: 317 - protein, 123 aa, Artificial sequence
  synthetic sequence
LLVVGADGVGCGGSGGGGSGGGGSIQRTPKIQVYSRHPAENGKSNFLNCYVSGFHPSDIEVDLLKNGERIEKVEHSDLSFSKDWSFYLLYYTEFTPTEKDEYACRVNHVTLSQPKIVKWDRDM

SEQ ID NO: 318 - protein, 123 aa, Artificial sequence
  synthetic sequence
LLVVGAVGVGGGGSGGGGSGGGGSIQRTPKIQVYSCHPAENGKSNFLNCYVSGFHPSDIEVDLLKNGERIEKVEHSDLSFSKDWSFYLLYYTEFTPTEKDEYACRVNHVTLSQPKIVKWDRDM

SEQ ID NO: 319 - protein, 123 aa, Artificial sequence
  synthetic sequence
LLVVGAVGVGCGGSGGGGSGGGGSIQRTPKIQVYSCHPAENGKSNFLNCYVSGFHPSDIEVDLLKNGERIEKVEHSDLSFSKDWSFYLLYYTEFTPTEKDEYACRVNHVTLSQPKIVKWDRDM

SEQ ID NO: 320 - protein, 123 aa, Artificial sequence
  synthetic sequence
LLVVGAVGVGCGGSGGGGSGGGGSIQRTPKIQVYSRHPAENGKSNFLNCYVSGFHPSDIEVDLLKNGERIEKVEHSDLSFSKDWSFYLLYYTEFTPTEKDEYACRVNHVTLSQPKIVKWDRDM

SEQ ID NO: 321 - protein, 123 aa, Artificial sequence
  synthetic sequence
LLVVGACGVGGGGSGGGGSGGGGSIQRTPKIQVYSCHPAENGKSNFLNCYVSGFHPSDIEVDLLKNGERIEKVEHSDLSFSKDWSFYLLYYTEFTPTEKDEYACRVNHVTLSQPKIVKWDRDM

SEQ ID NO: 322 - protein, 123 aa, Artificial sequence
  synthetic sequence
LLVVGACGVGCGGSGGGGSGGGGSIQRTPKIQVYSCHPAENGKSNFLNCYVSGFHPSDIEVDLLKNGERIEKVEHSDLSFSKDWSFYLLYYTEFTPTEKDEYACRVNHVTLSQPKIVKWDRDM

SEQ ID NO: 323 - protein, 123 aa, Artificial sequence
  synthetic sequence
LLVVGACGVGCGGSGGGGSGGGGSIQRTPKIQVYSRHPAENGKSNFLNCYVSGFHPSDIEVDLLKNGERIEKVEHSDLSFSKDWSFYLLYYTEFTPTEKDEYACRVNHVTLSQPKIVKWDRDM

SEQ ID NO: 324 - protein, 124 aa, Artificial sequence
  synthetic sequence
FLVVVGADGVGGGGSGGGGSGGGGSIQRTPKIQVYSCHPAENGKSNFLNCYVSGFHPSDIEVDLLKNGERIEKVEHSDLSFSKDWSFYLLYYTEFTPTEKDEYACRVNHVTLSQPKIVKWDRDM

SEQ ID NO: 325 - protein, 124 aa, Artificial sequence
  synthetic sequence
FLVVVGADGVGCGGSGGGGSGGGGSIQRTPKIQVYSCHPAENGKSNFLNCYVSGFHPSDIEVDLLKNGERIEKVEHSDLSFSKDWSFYLLYYTEFTPTEKDEYACRVNHVTLSQPKIVKWDRDM

SEQ ID NO: 326 - protein, 124 aa, Artificial sequence
  synthetic sequence
FLVVVGADGVGCGGSGGGGSGGGGSIQRTPKIQVYSRHPAENGKSNFLNCYVSGFHPSDIEVDLLKNGERIEKVEHSDLSFSKDWSFYLLYYTEFTPTEKDEYACRVNHVTLSQPKIVKWDRDM

SEQ ID NO: 327 - protein, 124 aa, Artificial sequence
  synthetic sequence
FLVVVGAVGVGGGGSGGGGSGGGGSIQRTPKIQVYSCHPAENGKSNFLNCYVSGFHPSDIEVDLLKNGERIEKVEHSDLSFSKDWSFYLLYYTEFTPTEKDEYACRVNHVTLSQPKIVKWDRDM

SEQ ID NO: 328 - protein, 124 aa, Artificial sequence
  synthetic sequence
FLVVVGAVGVGCGGSGGGGSGGGGSIQRTPKIQVYSCHPAENGKSNFLNCYVSGFHPSDIEVDLLKNGERIEKVEHSDLSFSKDWSFYLLYYTEFTPTEKDEYACRVNHVTLSQPKIVKWDRDM

SEQ ID NO: 329 - protein, 124 aa, Artificial sequence
  synthetic sequence
FLVVVGAVGVGCGGSGGGGSGGGGSIQRTPKIQVYSRHPAENGKSNFLNCYVSGFHPSDIEVDLLKNGERIEKVEHSDLSFSKDWSFYLLYYTEFTPTEKDEYACRVNHVTLSQPKIVKWDRDM

SEQ ID NO: 330 - protein, 124 aa, Artificial sequence
  synthetic sequence
FLVVVGACGVGGGGSGGGGSGGGGSIQRTPKIQVYSCHPAENGKSNFLNCYVSGFHPSDIEVDLLKNGERIEKVEHSDLSFSKDWSFYLLYYTEFTPTEKDEYACRVNHVTLSQPKIVKWDRDM

SEQ ID NO: 331 - protein, 124 aa, Artificial sequence
  synthetic sequence
FLVVVGACGVGCGGSGGGGSGGGGSIQRTPKIQVYSCHPAENGKSNFLNCYVSGFHPSDIEVDLLKNGERIEKVEHSDLSFSKDWSFYLLYYTEFTPTEKDEYACRVNHVTLSQPKIVKWDRDM

SEQ ID NO: 332 - protein, 124 aa, Artificial sequence
  synthetic sequence
FLVVVGACGVGCGGSGGGGSGGGGSIQRTPKIQVYSRHPAENGKSNFLNCYVSGFHPSDIEVDLLKNGERIEKVEHSDLSFSKDWSFYLLYYTEFTPTEKDEYACRVNHVTLSQPKIVKWDRDM

SEQ ID NO: 333 - protein, 946 aa, Artificial sequence
  synthetic sequence
KLVVVGADGVGGGGSGGGGSGGGGSIQRTPKIQVYSRHPAENGKSNFLNCYVSGFHPSDIEVDLLKNGERIEKVEHSDLSFSKDWSFYLLYYTEFTPTEKDEYACRVNHVTLSQPKIVKWDRDMGGGGSGGGGSGGGGSGSHSMRYFFTSVSRPGRGEPRFIAVGYVDDTQFVRFDSDAASQRMEPRAPWIEQEGPEYWDGETRKVKAHSQTHRVDLGTLRGCYNQSEAGSHTVQRMYGCDVGSDWRFLRGYHQYAYDGKDYIALKEDLRSWTAADMCAQTTKHKWEAAHVAEQLRAYLEGTCVEWLRRYLENGKETLQRTDAPKTHMTHHAVSDHEATLRCWALSFYPAEITLTWQRDGEDQTQDTELVETRPAGDGTFQKWAAVVVPSGQEQRYTCHVQHEGLPKPLTLRWEAAAGGDKTHTCPPCPAPEAAGGPSVFLFPPKPKDTLMISRTPEVTCVVVDVSHEDPEVKFNWYVDGVEVHNAKTKPREEQYNSTYRVVSVLTVLHQDWLNGKEYKCKVSNKALPAPIEKTISKAKGQPREPQVYTLPPSREEMTKNQVSLTCLVKGFYPSDIAVEWESNGQPENNYKTTPPVLDSDGSFFLYSKLTVDKSRWQQGNVFSCSVMHEALHNHYTQKSLSLSPGGGGGSGGGGSGGGGSAPTSSSTKKTQLQLEALLLDLQMILNGINNYKNPKLTRMLTAKFYMPKKATELKHLQCLEEELKPLEEVLNLAQSKNFHLRPRDLISNINVIVLELKGSETTFMCEYADETATIVEFLNRWITFCQSIISTLTGGGGSGGGGSGGGGSGGGGSAPTSSSTKKTQLQLEALLLDLQMILNGINNYKNPKLTRMLTAKFYMPKKATELKHLQCLEEELKPLEEVLNLAQSKNFHLRPRDLISNINVIVLELKGSETTFMCEYADETATIVEFLNRWITFCQSIISTLT

SEQ ID NO: 334 - protein, 946 aa, Artificial sequence
  synthetic sequence
VVVGADGVGKGCGGSGGGGSGGGGSIQRTPKIQVYSCHPAENGKSNFLNCYVSGFHPSDIEVDLLKNGERIEKVEHSDLSFSKDWSFYLLYYTEFTPTEKDEYACRVNHVTLSQPKIVKWDRDMGGGGSGGGGSGGGGSGSHSMRYFYTSVSRPGRGEPRFIAVGYVDDTQFVRFDSDAASQRMEPRAPWIEQEGPEYWDQETRNVKAQSQTDRVDLGTLRGCYNQSEDGSHTIQIMYGCDVGPDGRFLRGYRQDAYDGKDYIALNEDLRSWTAADMAAQITKRKWEAAHAAEQQRAYLEGTCVEWLRRYLENGKETLQRTDPPKTHMTHHPISDHEATLRCWALGFYPAEITLTWQRDGEDQTQDTELVETRPCGDGTFQKWAAVVVPSGEEQRYTCHVQHEGLPKPLTLRWEAAAGGDKTHTCPPCPAPEAAGGPSVFLFPPKPKDTLMISRTPEVTCVVVDVSHEDPEVKFNWYVDGVEVHNAKTKPREEQYNSTYRVVSVLTVLHQDWLNGKEYKCKVSNKALPAPIEKTISKAKGQPREPQVYTLPPSREEMTKNQVSLTCLVKGFYPSDIAVEWESNGQPENNYKTTPPVLDSDGSFFLYSKLTVDKSRWQQGNVFSCSVMHEALHNHYTQKSLSLSPGGGGGSGGGGSGGGGSAPTSSSTKKTQLQLEALLLDLQMILNGINNYKNPKLTRMLTAKFYMPKKATELKHLQCLEEELKPLEEVLNLAQSKNFHLRPRDLISNINVIVLELKGSETTFMCEYADETATIVEFLNRWITFCQSIISTLTGGGGSGGGGSGGGGSGGGGSAPTSSSTKKTQLQLEALLLDLQMILNGINNYKNPKLTRMLTAKFYMPKKATELKHLQCLEEELKPLEEVLNLAQSKNFHLRPRDLISNINVIVLELKGSETTFMCEYADETATIVEFLNRWITFCQSIISTLT

SEQ ID NO: 335 - protein, 946 aa, Artificial sequence
  synthetic sequence
VVVGAVGVGKGCGGSGGGGSGGGGSIQRTPKIQVYSCHPAENGKSNFLNCYVSGFHPSDIEVDLLKNGERIEKVEHSDLSFSKDWSFYLLYYTEFTPTEKDEYACRVNHVTLSQPKIVKWDRDMGGGGSGGGGSGGGGSGSHSMRYFYTSVSRPGRGEPRFIAVGYVDDTQFVRFDSDAASQRMEPRAPWIEQEGPEYWDQETRNVKAQSQTDRVDLGTLRGCYNQSEDGSHTIQIMYGCDVGPDGRFLRGYRQDAYDGKDYIALNEDLRSWTAADMAAQITKRKWEAAHAAEQQRAYLEGTCVEWLRRYLENGKETLQRTDPPKTHMTHHPISDHEATLRCWALGFYPAEITLTWQRDGEDQTQDTELVETRPCGDGTFQKWAAVVVPSGEEQRYTCHVQHEGLPKPLTLRWEAAAGGDKTHTCPPCPAPEAAGGPSVFLFPPKPKDTLMISRTPEVTCVVVDVSHEDPEVKFNWYVDGVEVHNAKTKPREEQYNSTYRVVSVLTVLHQDWLNGKEYKCKVSNKALPAPIEKTISKAKGQPREPQVYTLPPSREEMTKNQVSLTCLVKGFYPSDIAVEWESNGQPENNYKTTPPVLDSDGSFFLYSKLTVDKSRWQQGNVFSCSVMHEALHNHYTQKSLSLSPGGGGGSGGGGSGGGGSAPTSSSTKKTQLQLEALLLDLQMILNGINNYKNPKLTRMLTAKFYMPKKATELKHLQCLEEELKPLEEVLNLAQSKNFHLRPRDLISNINVIVLELKGSETTFMCEYADETATIVEFLNRWITFCQSIISTLTGGGGSGGGGSGGGGSGGGGSAPTSSSTKKTQLQLEALLLDLQMILNGINNYKNPKLTRMLTAKFYMPKKATELKHLQCLEEELKPLEEVLNLAQSKNFHLRPRDLISNINVIVLELKGSETTFMCEYADETATIVEFLNRWITFCQSIISTLT

SEQ ID NO: 336 - protein, 966 aa, Artificial sequence
  synthetic sequence
VVVGAVGVGKGCGGSGGGGSGGGGSIQRTPKIQVYSCHPAENGKSNFLNCYVSGFHPSDIEVDLLKNGERIEKVEHSDLSFSKDWSFYLLYYTEFTPTEKDEYACRVNHVTLSQPKIVKWDRDMGGGGSGGGGSGGGGSGGGGSGGGGSGGGGSGGGGSGSHSMRYFYTSVSRPGRGEPRFIAVGYVDDTQFVRFDSDAASQRMEPRAPWIEQEGPEYWDQETRNVKAQSQTDRVDLGTLRGCYNQSEDGSHTIQIMYGCDVGPDGRFLRGYRQDAYDGKDYIALNEDLRSWTAADMAAQITKRKWEAAHAAEQQRAYLEGTCVEWLRRYLENGKETLQRTDPPKTHMTHHPISDHEATLRCWALGFYPAEITLTWQRDGEDQTQDTELVETRPCGDGTFQKWAAVVVPSGEEQRYTCHVQHEGLPKPLTLRWEAAAGGDKTHTCPPCPAPEAAGGPSVFLFPPKPKDTLMISRTPEVTCVVVDVSHEDPEVKFNWYVDGVEVHNAKTKPREEQYNSTYRVVSVLTVLHQDWLNGKEYKCKVSNKALPAPIEKTISKAKGQPREPQVYTLPPSREEMTKNQVSLTCLVKGFYPSDIAVEWESNGQPENNYKTTPPVLDSDGSFFLYSKLTVDKSRWQQGNVFSCSVMHEALHNHYTQKSLSLSPGGGGGSGGGGSGGGGSAPTSSSTKKTQLQLEALLLDLQMILNGINNYKNPKLTRMLTAKFYMPKKATELKHLQCLEEELKPLEEVLNLAQSKNFHLRPRDLISNINVIVLELKGSETTFMCEYADETATIVEFLNRWITFCQSIISTLTGGGGSGGGGSGGGGSGGGGSAPTSSSTKKTQLQLEALLLDLQMILNGINNYKNPKLTRMLTAKFYMPKKATELKHLQCLEEELKPLEEVLNLAQSKNFHLRPRDLISNINVIVLELKGSETTFMCEYADETATIVEFLNRWITFCQSIISTLT

SEQ ID NO: 337 - protein, 956 aa, Artificial sequence
  synthetic sequence
VVVGAVGVGKGCGGSGGGGSGGGGSIQRTPKIQVYSCHPAENGKSNFLNCYVSGFHPSDIEVDLLKNGERIEKVEHSDLSFSKDWSFYLLYYTEFTPTEKDEYACRVNHVTLSQPKIVKWDRDMGGGGSGGGGSGGGGSGSHSMRYFYTSVSRPGRGEPRFIAVGYVDDTQFVRFDSDAASQRMEPRAPWIEQEGPEYWDQETRNVKAQSQTDRVDLGTLRGCYNQSEDGSHTIQIMYGCDVGPDGRFLRGYRQDAYDGKDYIALNEDLRSWTAADMAAQITKRKWEAAHAAEQQRAYLEGTCVEWLRRYLENGKETLQRTDPPKTHMTHHPISDHEATLRCWALGFYPAEITLTWQRDGEDQTQDTELVETRPCGDGTFQKWAAVVVPSGEEQRYTCHVQHEGLPKPLTLRWEGGGGSGGGGSGGGGSDKTHTCPPCPAPEAAGGPSVFLFPPKPKDTLMISRTPEVTCVVVDVSHEDPEVKFNWYVDGVEVHNAKTKPREEQYNSTYRVVSVLTVLHQDWLNGKEYKCKVSNKALPAPIEKTISKAKGQPREPQVYTLPPSREEMTKNQVSLTCLVKGFYPSDIAVEWESNGQPENNYKTTPPVLDSDGSFFLYSKLTVDKSRWQQGNVFSCSVMHEALHNHYTQKSLSLSPGGGGGSGGGGSGGGGSAPTSSSTKKTQLQLEALLLDLQMILNGINNYKNPKLTRMLTAKFYMPKKATELKHLQCLEEELKPLEEVLNLAQSKNFHLRPRDLISNINVIVLELKGSETTFMCEYADETATIVEFLNRWITFCQSIISTLTGGGGSGGGGSGGGGSGGGGSAPTSSSTKKTQLQLEALLLDLQMILNGINNYKNPKLTRMLTAKFYMPKKATELKHLQCLEEELKPLEEVLNLAQSKNFHLRPRDLISNINVIVLELKGSETTFMCEYADETATIVEFLNRWITFCQSIISTLT

SEQ ID NO: 338 - protein, 976 aa, Artificial sequence
  synthetic sequence
VVVGAVGVGKGCGGSGGGGSGGGGSIQRTPKIQVYSCHPAENGKSNFLNCYVSGFHPSDIEVDLLKNGERIEKVEHSDLSFSKDWSFYLLYYTEFTPTEKDEYACRVNHVTLSQPKIVKWDRDMGGGGSGGGGSGGGGSGGGGSGGGGSGGGGSGGGGSGSHSMRYFYTSVSRPGRGEPRFIAVGYVDDTQFVRFDSDAASQRMEPRAPWIEQEGPEYWDQETRNVKAQSQTDRVDLGTLRGCYNQSEDGSHTIQIMYGCDVGPDGRFLRGYRQDAYDGKDYIALNEDLRSWTAADMAAQITKRKWEAAHAAEQQRAYLEGTCVEWLRRYLENGKETLQRTDPPKTHMTHHPISDHEATLRCWALGFYPAEITLTWQRDGEDQTQDTELVETRPCGDGTFQKWAAVVVPSGEEQRYTCHVQHEGLPKPLTLRWEGGGGSGGGGSGGGGSDKTHTCPPCPAPEAAGGPSVFLFPPKPKDTLMISRTPEVTCVVVDVSHEDPEVKFNWYVDGVEVHNAKTKPREEQYNSTYRVVSVLTVLHQDWLNGKEYKCKVSNKALPAPIEKTISKAKGQPREPQVYTLPPSREEMTKNQVSLTCLVKGFYPSDIAVEWESNGQPENNYKTTPPVLDSDGSFFLYSKLTVDKSRWQQGNVFSCSVMHEALHNHYTQKSLSLSPGGGGGSGGGGSGGGGSAPTSSSTKKTQLQLEALLLDLQMILNGINNYKNPKLTRMLTAKFYMPKKATELKHLQCLEEELKPLEEVLNLAQSKNFHLRPRDLISNINVIVLELKGSETTFMCEYADETATIVEFLNRWITFCQSIISTLTGGGGSGGGGSGGGGSGGGGSAPTSSSTKKTQLQLEALLLDLQMILNGINNYKNPKLTRMLTAKFYMPKKATELKHLQCLEEELKPLEEVLNLAQSKNFHLRPRDLISNINVIVLELKGSETTFMCEYADETATIVEFLNRWITFCQSIISTLT

SEQ ID NO: 339 - protein, 878 aa, Artificial sequence
  synthetic sequence
APTSSSTKKTQLQLEALLLDLQMILNGINNYKNPKLTRMLTAKFYMPKKATELKHLQCLEEELKPLEEVLNLAQSKNFHLRPRDLISNINVIVLELKGSETTFMCEYADETATIVEFLNRWITFCQSIISTLTGGGGSGGGGSGGGGSGGGGSAPTSSSTKKTQLQLEALLLDLQMILNGINNYKNPKLTRMLTAKFYMPKKATELKHLQCLEEELKPLEEVLNLAQSKNFHLRPRDLISNINVIVLELKGSETTFMCEYADETATIVEFLNRWITFCQSIISTLTGGGGSGGGGSGGGGSGGGGSGSHSMRYFSTSVSRPGRGEPRFIAVGYVDDTQFVRFDSDAASQRMEPRAPWIEQEGPEYWDEETGKVKAHSQTDRENLRIALRAYNQSEAGSHTLQMMFGCDVGSDGRFLRGYHQYAYDGKDYIALKEDLRSWTAADMAAQITKRKWEAAHVAEQQRAYLEGTCVDGLRRYLENGKETLQRTDPPKTHMTHHPISDHEATLRCWALGFYPAEITLTWQRDGEDQTQDTELVETRPCGDGTFQKWAAVVVPSGEEQRYTCHVQHEGLPKPLTLRWEPSSQPTVPIVGIIAGLVLLGAVITGAVVAAVMWRRNSSDRKGGSYSQAASSDSAQGSDVSLTACKVAAAGGDKTHTCPPCPAPEAAGGPSVFLFPPKPKDTLMISRTPEVTCVVVDVSHEDPEVKFNWYVDGVEVHNAKTKPREEQYNSTYRVVSVLTVLHQDWLNGKEYKCKVSNKALPAPIEKTISKAKGQPREPQVYTLPPSREEMTKNQVSLTCLVKGFYPSDIAVEWESNGQPENNYKTTPPVLDSDGSFFLYSKLTVDKSRWQQGNVFSCSVMHEALHNHYTQKSLSLSPG

SEQ ID NO: 340 - protein, 878 aa, Artificial sequence
  synthetic sequence
APTSSSTKKTQLQLEALLLDLQMILNGINNYKNPKLTRMLTAKFYMPKKATELKHLQCLEEELKPLEEVLNLAQSKNFHLRPRDLISNINVIVLELKGSETTFMCEYADETATIVEFLNRWITFCQSIISTLTGGGGSGGGGSGGGGSGGGGSAPTSSSTKKTQLQLEALLLDLQMILNGINNYKNPKLTRMLTAKFYMPKKATELKHLQCLEEELKPLEEVLNLAQSKNFHLRPRDLISNINVIVLELKGSETTFMCEYADETATIVEFLNRWITFCQSIISTLTGGGGSGGGGSGGGGSGGGGSGSHSMRYFSTSVSRPGRGEPRFIAVGYVDDTQFVRFDSDAASQRMEPRAPWIEQEGPEYWDEETGKVKAHSQTDRENLRIALRCYNQSEAGSHTLQMMFGCDVGSDGRFLRGYHQYAYDGKDYIALKEDLRSWTAADMAAQITKRKWEAAHVAEQQRAYLEGTCVDGLRRYLENGKETLQRTDPPKTHMTHHPISDHEATLRCWALGFYPAEITLTWQRDGEDQTQDTELVETRPCGDGTFQKWAAVVVPSGEEQRYTCHVQHEGLPKPLTLRWEPSSQPTVPIVGIIAGLVLLGAVITGAVVAAVMWRRNSSDRKGGSYSQAASSDSAQGSDVSLTACKVAAAGGDKTHTCPPCPAPEAAGGPSVFLFPPKPKDTLMISRTPEVTCVVVDVSHEDPEVKFNWYVDGVEVHNAKTKPREEQYNSTYRVVSVLTVLHQDWLNGKEYKCKVSNKALPAPIEKTISKAKGQPREPQVYTLPPSREEMTKNQVSLTCLVKGFYPSDIAVEWESNGQPENNYKTTPPVLDSDGSFFLYSKLTVDKSRWQQGNVFSCSVMHEALHNHYTQKSLSLSPG

SEQ ID NO: 341 - protein, 878 aa, Artificial sequence
  synthetic sequence
APTSSSTKKTQLQLEALLLDLQMILNGINNYKNPKLTRMLTAKFYMPKKATELKHLQCLEEELKPLEEVLNLAQSKNFHLRPRDLISNINVIVLELKGSETTFMCEYADETATIVEFLNRWITFCQSIISTLTGGGGSGGGGSGGGGSGGGGSAPTSSSTKKTQLQLEALLLDLQMILNGINNYKNPKLTRMLTAKFYMPKKATELKHLQCLEEELKPLEEVLNLAQSKNFHLRPRDLISNINVIVLELKGSETTFMCEYADETATIVEFLNRWITFCQSIISTLTGGGGSGGGGSGGGGSGGGGSGSHSMRYFSTSVSRPGRGEPRFIAVGYVDDTQFVRFDSDAASQRMEPRAPWIEQEGPEYWDEETGKVKAHSQTDRENLRIALRCYNQSEAGSHTLQMMFGCDVGSDGRFLRGYHQYAYDGKDYIALKEDLRSWTAADMAAQITKRKWEAAHVAEQQRAYLEGTCVDGLRRYLENGKETLQRTDPPKTHMTHHPISDHEATLRCWALGFYPAEITLTWQRDGEDQTQDTELVETRPAGDGTFQKWAAVVVPSGEEQRYTCHVQHEGLPKPLTLRWEPSSQPTVPIVGIIAGLVLLGAVITGAVVAAVMWRRNSSDRKGGSYSQAASSDSAQGSDVSLTACKVAAAGGDKTHTCPPCPAPEAAGGPSVFLFPPKPKDTLMISRTPEVTCVVVDVSHEDPEVKFNWYVDGVEVHNAKTKPREEQYNSTYRVVSVLTVLHQDWLNGKEYKCKVSNKALPAPIEKTISKAKGQPREPQVYTLPPSREEMTKNQVSLTCLVKGFYPSDIAVEWESNGQPENNYKTTPPVLDSDGSFFLYSKLTVDKSRWQQGNVFSCSVMHEALHNHYTQKSLSLSPG

SEQ ID NO: 342 - protein, 807 aa, Artificial sequence
  synthetic sequence
GSHSMRYFFTSVSRPGRGEPRFIAVGYVDDTQFVRFDSDAASQRMEPRAPWIEQEGPEYWDGETRKVKAHSQTHRVDLGTLRGCYNQSEAGSHTVQRMYGCDVGSDWRFLRGYHQYAYDGKDYIALKEDLRSWTAADMCAQTTKHKWEAAHVAEQLRAYLEGTCVEWLRRYLENGKETLQRTDAPKTHMTHHAVSDHEATLRCWALSFYPAEITLTWQRDGEDQTQDTELVETRPCGDGTFQKWAAVVVPSGQEQRYTCHVQHEGLPKPLTLRWEAAAGGDKTHTCPPCPAPEAAGGPSVFLFPPKPKDTLMISRTPEVTCVVVDVSHEDPEVKFNWYVDGVEVHNAKTKPREEQYNSTYRVVSVLTVLHQDWLNGKEYKCKVSNKALPAPIEKTISKAKGQPREPQVYTLPPSREEMTKNQVSLTCLVKGFYPSDIAVEWESNGQPENNYKTTPPVLDSDGSFFLYSKLTVDKSRWQQGNVFSCSVMHEALHNHYTQKSLSLSPGGGGGSGGGGSGGGGSAPTSSSTKKTQLQLEALLLDLQMILNGINNYKNPKLTRMLTAKFYMPKKATELKHLQCLEEELKPLEEVLNLAQSKNFHLRPRDLISNINVIVLELKGSETTFMCEYADETATIVEFLNRWITFCQSIISTLTGGGGSGGGGSGGGGSGGGGSAPTSSSTKKTQLQLEALLLDLQMILNGINNYKNPKLTRMLTAKFYMPKKATELKHLQCLEEELKPLEEVLNLAQSKNFHLRPRDLISNINVIVLELKGSETTFMCEYADETATIVEFLNRWITFCQSIISTLT

SEQ ID NO: 343 - protein, 812 aa, Artificial sequence
  synthetic sequence
APTSSSTKKTQLQLEALLLDLQMILNGINNYKNPKLTRMLTAKFYMPKKATELKHLQCLEEELKPLEEVLNLAQSKNFHLRPRDLISNINVIVLELKGSETTFMCEYADETATIVEFLNRWITFCQSIISTLTGGGGSGGGGSGGGGSGGGGSAPTSSSTKKTQLQLEALLLDLQMILNGINNYKNPKLTRMLTAKFYMPKKATELKHLQCLEEELKPLEEVLNLAQSKNFHLRPRDLISNINVIVLELKGSETTFMCEYADETATIVEFLNRWITFCQSIISTLTGGGGSGGGGSGGGGSGGGGSGSHSMRYFFTSVSRPGRGEPRFIAVGYVDDTQFVRFDSDAASQRMEPRAPWIEQEGPEYWDGETRKVKAHSQTHRVDLGTLRGCYNQSEAGSHTVQRMYGCDVGSDWRFLRGYHQYAYDGKDYIALKEDLRSWTAADMCAQTTKHKWEAAHVAEQLRAYLEGTCVEWLRRYLENGKETLQRTDAPKTHMTHHAVSDHEATLRCWALSFYPAEITLTWQRDGEDQTQDTELVETRPCGDGTFQKWAAVVVPSGQEQRYTCHVQHEGLPKPLTLRWEAAAGGDKTHTCPPCPAPEAAGGPSVFLFPPKPKDTLMISRTPEVTCVVVDVSHEDPEVKFNWYVDGVEVHNAKTKPREEQYNSTYRVVSVLTVLHQDWLNGKEYKCKVSNKALPAPIEKTISKAKGQPREPQVYTLPPSREEMTKNQVSLTCLVKGFYPSDIAVEWESNGQPENNYKTTPPVLDSDGSFFLYSKLTVDKSRWQQGNVFSCSVMHEALHNHYTQKSLSLSPG

SEQ ID NO: 344 - protein, 807 aa, Artificial sequence
  synthetic sequence
GSHSMRYFYTSVSRPGRGEPRFIAVGYVDDTQFVRFDSDAASQRMEPRAPWIEQEGPEYWDQETRNVKAQSQTDRVDLGTLRGCYNQSEDGSHTIQIMYGCDVGPDGRFLRGYRQDAYDGKDYIALNEDLRSWTAADMAAQITKRKWEAAHAAEQQRAYLEGTCVEWLRRYLENGKETLQRTDPPKTHMTHHPISDHEATLRCWALGFYPAEITLTWQRDGEDQTQDTELVETRPCGDGTFQKWAAVVVPSGEEQRYTCHVQHEGLPKPLTLRWEAAAGGDKTHTCPPCPAPEAAGGPSVFLFPPKPKDTLMISRTPEVTCVVVDVSHEDPEVKFNWYVDGVEVHNAKTKPREEQYNSTYRVVSVLTVLHQDWLNGKEYKCKVSNKALPAPIEKTISKAKGQPREPQVYTLPPSREEMTKNQVSLTCLVKGFYPSDIAVEWESNGQPENNYKTTPPVLDSDGSFFLYSKLTVDKSRWQQGNVFSCSVMHEALHNHYTQKSLSLSPGGGGGSGGGGSGGGGSAPTSSSTKKTQLQLEALLLDLQMILNGINNYKNPKLTRMLTAKFYMPKKATELKHLQCLEEELKPLEEVLNLAQSKNFHLRPRDLISNINVIVLELKGSETTFMCEYADETATIVEFLNRWITFCQSIISTLTGGGGSGGGGSGGGGSGGGGSAPTSSSTKKTQLQLEALLLDLQMILNGINNYKNPKLTRMLTAKFYMPKKATELKHLQCLEEELKPLEEVLNLAQSKNFHLRPRDLISNINVIVLELKGSETTFMCEYADETATIVEFLNRWITFCQSIISTLT

SEQ ID NO: 345 - protein, 8 aa, Artificial sequence
  synthetic sequence
  misc_feature (1)..(8): Xaa can be any naturally occurring amino acid
XXXXXXXX

SEQ ID NO: 346 - protein, 8 aa, Artificial sequence
  synthetic sequence
  misc_feature (1)..(8): Xaa can be any naturally occurring amino acid
XXXXXXXX

SEQ ID NO: 347 - protein, 8 aa, Artificial sequence
  synthetic sequence
  misc_feature (1)..(8): Xaa can be any naturally occurring amino acid
XXXXXXXX

SEQ ID NO: 348 - protein, 8 aa, Artificial sequence
  synthetic sequence
  misc_feature (1)..(8): Xaa can be any naturally occurring amino acid
XXXXXXXX

SEQ ID NO: 349 - protein, 8 aa, Artificial sequence
  synthetic sequence
  misc_feature (1)..(8): Xaa can be any naturally occurring amino acid
XXXXXXXX

SEQ ID NO: 350 - protein, 8 aa, Artificial sequence
  synthetic sequence
  misc_feature (1)..(8): Xaa can be any naturally occurring amino acid
XXXXXXXX

SEQ ID NO: 351 - protein, 8 aa, Artificial sequence
  synthetic sequence
  misc_feature (1)..(8): Xaa can be any naturally occurring amino acid
XXXXXXXX

SEQ ID NO: 352 - protein, 8 aa, Artificial sequence
  synthetic sequence
  misc_feature (1)..(8): Xaa can be any naturally occurring amino acid
XXXXXXXX

SEQ ID NO: 353 - protein, 8 aa, Artificial sequence
  synthetic sequence
  misc_feature (1)..(8): Xaa can be any naturally occurring amino acid
XXXXXXXX

SEQ ID NO: 354 - protein, 8 aa, Artificial sequence
  synthetic sequence
  misc_feature (1)..(8): Xaa can be any naturally occurring amino acid
XXXXXXXX

SEQ ID NO: 355 - protein, 8 aa, Artificial sequence
  synthetic sequence
  misc_feature (1)..(8): Xaa can be any naturally occurring amino acid
XXXXXXXX

SEQ ID NO: 356 - protein, 8 aa, Artificial sequence
  synthetic sequence
  misc_feature (1)..(8): Xaa can be any naturally occurring amino acid
XXXXXXXX

SEQ ID NO: 357 - protein, 8 aa, Artificial sequence
  synthetic sequence
  misc_feature (1)..(8): Xaa can be any naturally occurring amino acid
XXXXXXXX

SEQ ID NO: 358 - protein, 8 aa, Artificial sequence
  synthetic sequence
  misc_feature (1)..(8): Xaa can be any naturally occurring amino acid
XXXXXXXX

SEQ ID NO: 359 - protein, 8 aa, Artificial sequence
  synthetic sequence
  misc_feature (1)..(8): Xaa can be any naturally occurring amino acid
XXXXXXXX

SEQ ID NO: 360 - protein, 8 aa, Artificial sequence
  synthetic sequence
  misc_feature (1)..(8): Xaa can be any naturally occurring amino acid
XXXXXXXX

SEQ ID NO: 361 - protein, 8 aa, Artificial sequence
  synthetic sequence
  misc_feature (1)..(8): Xaa can be any naturally occurring amino acid
XXXXXXXX

SEQ ID NO: 362 - protein, 8 aa, Artificial sequence
  synthetic sequence
  misc_feature (1)..(8): Xaa can be any naturally occurring amino acid
XXXXXXXX

SEQ ID NO: 363 - protein, 8 aa, Artificial sequence
  synthetic sequence
  misc_feature (1)..(8): Xaa can be any naturally occurring amino acid
XXXXXXXX

SEQ ID NO: 364 - protein, 8 aa, Artificial sequence
  synthetic sequence
  misc_feature (1)..(8): Xaa can be any naturally occurring amino acid
XXXXXXXX

SEQ ID NO: 365 - protein, 8 aa, Artificial sequence
  synthetic sequence
  misc_feature (1)..(8): Xaa can be any naturally occurring amino acid
XXXXXXXX

SEQ ID NO: 366 - protein, 5 aa, Artificial sequence
  synthetic sequence
  MISC_FEATURE (1)..(5): The residues may be repeated
GSGGS

SEQ ID NO: 367 - protein, 4 aa, Artificial sequence
  synthetic sequence
  MISC_FEATURE (1)..(4): The residues may be repeated
GGGS

SEQ ID NO: 368 - protein, 4 aa, Artificial sequence
  synthetic sequence
GGSG

SEQ ID NO: 369 - protein, 5 aa, Artificial sequence
  synthetic sequence
GGSGG

SEQ ID NO: 370 - protein, 5 aa, Artificial sequence
  synthetic sequence
GSGSG

SEQ ID NO: 371 - protein, 5 aa, Artificial sequence
  synthetic sequence
GSGGG

SEQ ID NO: 372 - protein, 5 aa, Artificial sequence
  synthetic sequence
GGGSG

SEQ ID NO: 373 - protein, 5 aa, Artificial sequence
  synthetic sequence
GSSSG

SEQ ID NO: 374 - protein, 5 aa, Artificial sequence
  synthetic sequence
  MISC_FEATURE (2)..(5): The residues may be repeated 1, 2, 3, 4, 5, 6, 7, 8, 9, or 10 times.
GSSSS

SEQ ID NO: 375 - protein, 20 aa, Artificial sequence
  synthetic sequence
GSSSSGSSSSGSSSSGSSSS

SEQ ID NO: 376 - protein, 25 aa, Artificial sequence
  synthetic sequence
GSSSSGSSSSGSSSSGSSSSGSSSS

SEQ ID NO: 377 - protein, 5 aa, Artificial sequence
  synthetic sequence
GGGGS

SEQ ID NO: 378 - protein, 8 aa, Artificial sequence
  synthetic sequence
  misc_feature (1)..(8): Xaa can be any naturally occurring amino acid
XXXXXXXX

SEQ ID NO: 379 - protein, 8 aa, Artificial sequence
  synthetic sequence
  misc_feature (1)..(8): Xaa can be any naturally occurring amino acid
XXXXXXXX

SEQ ID NO: 380 - protein, 8 aa, Artificial sequence
  synthetic sequence
  misc_feature (1)..(8): Xaa can be any naturally occurring amino acid
XXXXXXXX

SEQ ID NO: 381 - protein, 8 aa, Artificial sequence
  synthetic sequence
  misc_feature (1)..(8): Xaa can be any naturally occurring amino acid
XXXXXXXX

SEQ ID NO: 382 - protein, 8 aa, Artificial sequence
  synthetic sequence
  misc_feature (1)..(8): Xaa can be any naturally occurring amino acid
XXXXXXXX

SEQ ID NO: 383 - protein, 8 aa, Artificial sequence
  synthetic sequence
  misc_feature (1)..(8): Xaa can be any naturally occurring amino acid
XXXXXXXX

SEQ ID NO: 384 - protein, 8 aa, Artificial sequence
  synthetic sequence
  misc_feature (1)..(8): Xaa can be any naturally occurring amino acid
XXXXXXXX

SEQ ID NO: 385 - protein, 8 aa, Artificial sequence
  synthetic sequence
  misc_feature (1)..(8): Xaa can be any naturally occurring amino acid
XXXXXXXX

SEQ ID NO: 386 - protein, 8 aa, Artificial sequence
  synthetic sequence
  misc_feature (1)..(8): Xaa can be any naturally occurring amino acid
XXXXXXXX

SEQ ID NO: 387 - protein, 5 aa, Artificial sequence
  synthetic sequence
AAAGG

SEQ ID NO: 388 - protein, 15 aa, Artificial sequence
  synthetic sequence
GCGGSGGGGSGGGGS

SEQ ID NO: 389 - protein, 10 aa, Artificial sequence
  synthetic sequence
  MISC_FEATURE (6)..(10): The residues may be repeated 1, 2, 3, 4, 5, 6, 7, 8, or 9 times.
GCGGSGGGGS

SEQ ID NO: 390 - protein, 20 aa, Artificial sequence
  synthetic sequence
GCGGSGGGGSGGGGSGGGGS

SEQ ID NO: 391 - protein, 15 aa, Artificial sequence
  synthetic sequence
GCGGSGGGGSGGGGS

SEQ ID NO: 392 - protein, 8 aa, Artificial sequence
  synthetic sequence
  misc_feature (1)..(8): Xaa can be any naturally occurring amino acid
XXXXXXXX

SEQ ID NO: 393 - protein, 8 aa, Artificial sequence
  synthetic sequence
  misc_feature (1)..(8): Xaa can be any naturally occurring amino acid
XXXXXXXX

SEQ ID NO: 394 - protein, 8 aa, Artificial sequence
  synthetic sequence
  misc_feature (1)..(8): Xaa can be any naturally occurring amino acid
XXXXXXXX

SEQ ID NO: 395 - protein, 8 aa, Artificial sequence
  synthetic sequence
  misc_feature (1)..(8): Xaa can be any naturally occurring amino acid
XXXXXXXX

SEQ ID NO: 396 - protein, 8 aa, Artificial sequence
  synthetic sequence
  misc_feature (1)..(8): Xaa can be any naturally occurring amino acid
XXXXXXXX

SEQ ID NO: 397 - protein, 8 aa, Artificial sequence
  synthetic sequence
  misc_feature (1)..(8): Xaa can be any naturally occurring amino acid
XXXXXXXX

SEQ ID NO: 398 - protein, 219 aa, Artificial sequence
  synthetic sequence
  misc_feature (8)..(8): Xaa is any aminoa cid other than Asp.
FTVTVPKXLYVVEYGSNMTIECKFPVEKQLDLAALIVYWEMEDKNIIQFVHGEEDLKVQHSSYRQRARLLKDQLSLGNAALQITDVKLQDAGVYRCMISYGGADYKRITVKVNAPYNKINQRILVVDPVTSEHELTCQAEGYPKAEVIWTSSDHQVLSGKTTTTNSKREEKLFNVTSTLRINTTTNEIFYCTFRRLDPEENHTAELVIPGNILNVSIKI

SEQ ID NO: 399 - protein, 219 aa, Artificial sequence
  synthetic sequence
  misc_feature (36)..(36): Xaa is any amino acid other than Ile
FTVTVPKDLYVVEYGSNMTIECKFPVEKQLDLAALXVYWEMEDKNIIQFVHGEEDLKVQHSSYRQRARLLKDQLSLGNAALQITDVKLQDAGVYRCMISYGGADYKRITVKVNAPYNKINQRILVVDPVTSEHELTCQAEGYPKAEVIWTSSDHQVLSGKTTTTNSKREEKLFNVTSTLRINTTTNEIFYCTFRRLDPEENHTAELVIPGNILNVSIKI

SEQ ID NO: 400 - protein, 219 aa, Artificial sequence
  synthetic sequence
  misc_feature (54)..(54): Xaa can be any amino acid other than glutamine
FTVTVPKDLYVVEYGSNMTIECKFPVEKQLDLAALIVYWEMEDKNIIQFVHGEXDLKVQHSSYRQRARLLKDQLSLGNAALQITDVKLQDAGVYRCMISYGGADYKRITVKVNAPYNKINQRILVVDPVTSEHELTCQAEGYPKAEVIWTSSDHQVLSGKTTTTNSKREEKLFNVTSTLRINTTTNEIFYCTFRRLDPEENHTAELVIPGNILNVSIKI

SEQ ID NO: 401 - protein, 208 aa, Artificial sequence
  synthetic sequence
  misc_feature (19)..(19): Xaa can be any amino acid other than asparagine
VIHVTKEVKEVATLSCGHXVSVEELAQTRIYWQKEKKMVLTMMSGDMNIWPEYKNRTIFDITNNLSIVILALRPSDEGTYECVVLKYEKDAFKREHLAEVTLSVKADFPTPSISDFEIPTSNIRRIICSTSGGFPEPHLSWLENGEELNAINTTVSQDPETELYAVSSKLDFNMTTNHSFMCLIKYGHLRVNQTFNWNTTKQEHFPDN

SEQ ID NO: 402 - protein, 208 aa, Artificial sequence
  synthetic sequence
  misc_feature (63)..(63): Xaa can be any amino acid other than asparagine
VIHVTKEVKEVATLSCGHNVSVEELAQTRIYWQKEKKMVLTMMSGDMNIWPEYKNRTIFDITXNLSIVILALRPSDEGTYECVVLKYEKDAFKREHLAEVTLSVKADFPTPSISDFEIPTSNIRRIICSTSGGFPEPHLSWLENGEELNAINTTVSQDPETELYAVSSKLDFNMTTNHSFMCLIKYGHLRVNQTFNWNTTKQEHFPDN

SEQ ID NO: 403 - protein, 208 aa, Artificial sequence
  synthetic sequence
  misc_feature (67)..(67): Xaa can be any amino acid other than isoleucine
VIHVTKEVKEVATLSCGHNVSVEELAQTRIYWQKEKKMVLTMMSGDMNIWPEYKNRTIFDITNNLSXVILALRPSDEGTYECVVLKYEKDAFKREHLAEVTLSVKADFPTPSISDFEIPTSNIRRIICSTSGGFPEPHLSWLENGEELNAINTTVSQDPETELYAVSSKLDFNMTTNHSFMCLIKYGHLRVNQTFNWNTTKQEHFPDN

SEQ ID NO: 404 - protein, 208 aa, Artificial sequence
  synthetic sequence
  misc_feature (86)..(86): Xaa can be any amino acid other than lysine
VIHVTKEVKEVATLSCGHNVSVEELAQTRIYWQKEKKMVLTMMSGDMNIWPEYKNRTIFDITNNLSIVILALRPSDEGTYECVVLXYEKDAFKREHLAEVTLSVKADFPTPSISDFEIPTSNIRRIICSTSGGFPEPHLSWLENGEELNAINTTVSQDPETELYAVSSKLDFNMTTNHSFMCLIKYGHLRVNQTFNWNTTKQEHFPDN

SEQ ID NO: 405 - protein, 208 aa, Artificial sequence
  synthetic sequence
  misc_feature (157)..(157): any amino acid other than glutamine
VIHVTKEVKEVATLSCGHNVSVEELAQTRIYWQKEKKMVLTMMSGDMNIWPEYKNRTIFDITNNLSIVILALRPSDEGTYECVVLKYEKDAFKREHLAEVTLSVKADFPTPSISDFEIPTSNIRRIICSTSGGFPEPHLSWLENGEELNAINTTVSXDPETELYAVSSKLDFNMTTNHSFMCLIKYGHLRVNQTFNWNTTKQEHFPDN

SEQ ID NO: 406 - protein, 208 aa, Artificial sequence
  synthetic sequence
  misc_feature (158)..(158): any amino acid other than aspartic acid
VIHVTKEVKEVATLSCGHNVSVEELAQTRIYWQKEKKMVLTMMSGDMNIWPEYKNRTIFDITNNLSIVILALRPSDEGTYECVVLKYEKDAFKREHLAEVTLSVKADFPTPSISDFEIPTSNIRRIICSTSGGFPEPHLSWLENGEELNAINTTVSQXPETELYAVSSKLDFNMTTNHSFMCLIKYGHLRVNQTFNWNTTKQEHFPDN

SEQ ID NO: 407 - protein, 208 aa, Artificial sequence
  synthetic sequence
  misc_feature (25)..(25): Xaa can be any amino acid other than leucine
VIHVTKEVKEVATLSCGHNVSVEEXAQTRIYWQKEKKMVLTMMSGDMNIWPEYKNRTIFDITNNLSIVILALRPSDEGTYECVVLKYEKDAFKREHLAEVTLSVKADFPTPSISDFEIPTSNIRRIICSTSGGFPEPHLSWLENGEELNAINTTVSQDPETELYAVSSKLDFNMTTNHSFMCLIKYGHLRVNQTFNWNTTKQEHFPDN

SEQ ID NO: 408 - protein, 208 aa, Artificial sequence
  synthetic sequence
  misc_feature (31)..(31): Xaa can be any amino acid other than tyrosine
VIHVTKEVKEVATLSCGHNVSVEELAQTRIXWQKEKKMVLTMMSGDMNIWPEYKNRTIFDITNNLSIVILALRPSDEGTYECVVLKYEKDAFKREHLAEVTLSVKADFPTPSISDFEIPTSNIRRIICSTSGGFPEPHLSWLENGEELNAINTTVSQDPETELYAVSSKLDFNMTTNHSFMCLIKYGHLRVNQTFNWNTTKQEHFPDN

SEQ ID NO: 409 - protein, 208 aa, Artificial sequence
  synthetic sequence
  misc_feature (33)..(33): Xaa can be any amino acid other than glutamine
VIHVTKEVKEVATLSCGHNVSVEELAQTRIYWXKEKKMVLTMMSGDMNIWPEYKNRTIFDITNNLSIVILALRPSDEGTYECVVLKYEKDAFKREHLAEVTLSVKADFPTPSISDFEIPTSNIRRIICSTSGGFPEPHLSWLENGEELNAINTTVSQDPETELYAVSSKLDFNMTTNHSFMCLIKYGHLRVNQTFNWNTTKQEHFPDN

SEQ ID NO: 410 - protein, 208 aa, Artificial sequence
  synthetic sequence
  misc_feature (38)..(38): Xaa can be any amino acid other than methionine
VIHVTKEVKEVATLSCGHNVSVEELAQTRIYWQKEKKXVLTMMSGDMNIWPEYKNRTIFDITNNLSIVILALRPSDEGTYECVVLKYEKDAFKREHLAEVTLSVKADFPTPSISDFEIPTSNIRRIICSTSGGFPEPHLSWLENGEELNAINTTVSQDPETELYAVSSKLDFNMTTNHSFMCLIKYGHLRVNQTFNWNTTKQEHFPDN

SEQ ID NO: 411 - protein, 208 aa, Artificial sequence
  synthetic sequence
  misc_feature (39)..(39): Xaa can be any amino acid other than valine
VIHVTKEVKEVATLSCGHNVSVEELAQTRIYWQKEKKMXLTMMSGDMNIWPEYKNRTIFDITNNLSIVILALRPSDEGTYECVVLKYEKDAFKREHLAEVTLSVKADFPTPSISDFEIPTSNIRRIICSTSGGFPEPHLSWLENGEELNAINTTVSQDPETELYAVSSKLDFNMTTNHSFMCLIKYGHLRVNQTFNWNTTKQEHFPDN

SEQ ID NO: 412 - protein, 208 aa, Artificial sequence
  synthetic sequence
  misc_feature (49)..(49): Xaa can be any amino acid other than isoleucine
VIHVTKEVKEVATLSCGHNVSVEELAQTRIYWQKEKKMVLTMMSGDMNXWPEYKNRTIFDITNNLSIVILALRPSDEGTYECVVLKYEKDAFKREHLAEVTLSVKADFPTPSISDFEIPTSNIRRIICSTSGGFPEPHLSWLENGEELNAINTTVSQDPETELYAVSSKLDFNMTTNHSFMCLIKYGHLRVNQTFNWNTTKQEHFPDN

SEQ ID NO: 413 - protein, 208 aa, Artificial sequence
  synthetic sequence
  misc_feature (53)..(53): Xaa can be any amino acid other than aspartic acid
VIHVTKEVKEVATLSCGHNVSVEELAQTRIYWQKEKKMVLTMMSGDMNIWPEXKNRTIFDITNNLSIVILALRPSDEGTYECVVLKYEKDAFKREHLAEVTLSVKADFPTPSISDFEIPTSNIRRIICSTSGGFPEPHLSWLENGEELNAINTTVSQDPETELYAVSSKLDFNMTTNHSFMCLIKYGHLRVNQTFNWNTTKQEHFPDN

SEQ ID NO: 414 - protein, 208 aa, Artificial sequence
  synthetic sequence
  misc_feature (60)..(60): any amino acid other than aspartic acid
VIHVTKEVKEVATLSCGHNVSVEELAQTRIYWQKEKKMVLTMMSGDMNIWPEYKNRTIFXITNNLSIVILALRPSDEGTYECVVLKYEKDAFKREHLAEVTLSVKADFPTPSISDFEIPTSNIRRIICSTSGGFPEPHLSWLENGEELNAINTTVSQDPETELYAVSSKLDFNMTTNHSFMCLIKYGHLRVNQTFNWNTTKQEHFPDN

SEQ ID NO: 415 - protein, 208 aa, Artificial sequence
  synthetic sequence
  misc_feature (108)..(108): Xaa can be any amino acid other than phenylalanine
VIHVTKEVKEVATLSCGHNVSVEELAQTRIYWQKEKKMVLTMMSGDMNIWPEYKNRTIFDITNNLSIVILALRPSDEGTYECVVLKYEKDAFKREHLAEVTLSVKADXPTPSISDFEIPTSNIRRIICSTSGGFPEPHLSWLENGEELNAINTTVSQDPETELYAVSSKLDFNMTTNHSFMCLIKYGHLRVNQTFNWNTTKQEHFPDN

SEQ ID NO: 416 - protein, 208 aa, Artificial sequence
  synthetic sequence
  misc_feature (156)..(156): Xaa can be any amino acid other than serine
VIHVTKEVKEVATLSCGHNVSVEELAQTRIYWQKEKKMVLTMMSGDMNIWPEYKNRTIFDITNNLSIVILALRPSDEGTYECVVLKYEKDAFKREHLAEVTLSVKADFPTPSISDFEIPTSNIRRIICSTSGGFPEPHLSWLENGEELNAINTTVXQDPETELYAVSSKLDFNMTTNHSFMCLIKYGHLRVNQTFNWNTTKQEHFPDN

SEQ ID NO: 417 - protein, 208 aa, Artificial sequence
  synthetic sequence
  misc_feature (111)..(111): Xaa can be any amino acid other than proline
VIHVTKEVKEVATLSCGHNVSVEELAQTRIYWQKEKKMVLTMMSGDMNIWPEYKNRTIFDITNNLSIVILALRPSDEGTYECVVLKYEKDAFKREHLAEVTLSVKADFPTXSISDFEIPTSNIRRIICSTSGGFPEPHLSWLENGEELNAINTTVSQDPETELYAVSSKLDFNMTTNHSFMCLIKYGHLRVNQTFNWNTTKQEHFPDN

SEQ ID NO: 418 - protein, 224 aa, Artificial sequence
  synthetic sequence
  misc_feature (61)..(61): Xaa can be any amino acid other than asparagine
APLKIQAYFNETADLPCQFANSQNQSLSELVVFWQDQENLVLNEVYLGKEKFDSVHSKYMXRTSFDSDSWTLRLHNLQIKDKGLYQCIIHHKKPTGMIRIHQMNSELSVLANFSQPEIVPISNITENVYINLTCSSIHGYPEPKKMSVLLRTKNSTIEYDGIMQKSQDNVTELYDVSISLSVSFPDVTSNMTIFCILETDKTRLLSSPFSIELEDPQPPPDHIP

SEQ ID NO: 419 - protein, 224 aa, Artificial sequence
  synthetic sequence
  misc_feature (66)..(66): Xaa can be any amino acid other than aspartic acid
APLKIQAYFNETADLPCQFANSQNQSLSELVVFWQDQENLVLNEVYLGKEKFDSVHSKYMNRTSFXSDSWTLRLHNLQIKDKGLYQCIIHHKKPTGMIRIHQMNSELSVLANFSQPEIVPISNITENVYINLTCSSIHGYPEPKKMSVLLRTKNSTIEYDGIMQKSQDNVTELYDVSISLSVSFPDVTSNMTIFCILETDKTRLLSSPFSIELEDPQPPPDHIP

SEQ ID NO: 420 - protein, 224 aa, Artificial sequence
  synthetic sequence
  misc_feature (70)..(70): Xaa can be any amino acid other than tryptophan
APLKIQAYFNETADLPCQFANSQNQSLSELVVFWQDQENLVLNEVYLGKEKFDSVHSKYMNRTSFDSDSXTLRLHNLQIKDKGLYQCIIHHKKPTGMIRIHQMNSELSVLANFSQPEIVPISNITENVYINLTCSSIHGYPEPKKMSVLLRTKNSTIEYDGIMQKSQDNVTELYDVSISLSVSFPDVTSNMTIFCILETDKTRLLSSPFSIELEDPQPPPDHIP

SEQ ID NO: 421 - protein, 224 aa, Artificial sequence
  synthetic sequence
  misc_feature (91)..(91): Xaa can be any amino acid other than histidine
APLKIQAYFNETADLPCQFANSQNQSLSELVVFWQDQENLVLNEVYLGKEKFDSVHSKYMNRTSFDSDSWTLRLHNLQIKDKGLYQCIIHXKKPTGMIRIHQMNSELSVLANFSQPEIVPISNITENVYINLTCSSIHGYPEPKKMSVLLRTKNSTIEYDGIMQKSQDNVTELYDVSISLSVSFPDVTSNMTIFCILETDKTRLLSSPFSIELEDPQPPPDHIP

SEQ ID NO: 422 - protein, 110 aa, Artificial sequence
  synthetic sequence
  misc_feature (61)..(61): Xaa can be any amino acid other than asparagine
APLKIQAYFNETADLPCQFANSQNQSLSELVVFWQDQENLVLNEVYLGKEKFDSVHSKYMXRTSFDSDSWTLRLHNLQIKDKGLYQCIIHHKKPTGMIRIHQMNSELSVL

SEQ ID NO: 423 - protein, 110 aa, Artificial sequence
  synthetic sequence
  misc_feature (66)..(66): Xaa can be any amino acid other than aspartic acid
APLKIQAYFNETADLPCQFANSQNQSLSELVVFWQDQENLVLNEVYLGKEKFDSVHSKYMNRTSFXSDSWTLRLHNLQIKDKGLYQCIIHHKKPTGMIRIHQMNSELSVL

SEQ ID NO: 424 - protein, 110 aa, Artificial sequence
  synthetic sequence
  misc_feature (70)..(70): Xaa can be any amino acid other than tryptophan
APLKIQAYFNETADLPCQFANSQNQSLSELVVFWQDQENLVLNEVYLGKEKFDSVHSKYMNRTSFDSDSXTLRLHNLQIKDKGLYQCIIHHKKPTGMIRIHQMNSELSVL

SEQ ID NO: 425 - protein, 110 aa, Artificial sequence
  synthetic sequence
  misc_feature (91)..(91): Xaa can be any amino acid other than histidine
APLKIQAYFNETADLPCQFANSQNQSLSELVVFWQDQENLVLNEVYLGKEKFDSVHSKYMNRTSFDSDSWTLRLHNLQIKDKGLYQCIIHXKKPTGMIRIHQMNSELSVL

SEQ ID NO: 426 - protein, 224 aa, Artificial sequence
  synthetic sequence
  misc_feature (41)..(41): Xaa can be any amino acid other than valine
APLKIQAYFNETADLPCQFANSQNQSLSELVVFWQDQENLXLNEVYLGKEKFDSVHSKYMNRTSFDSDSWTLRLHNLQIKDKGLYQCIIHHKKPTGMIRIHQMNSELSVLANFSQPEIVPISNITENVYINLTCSSIHGYPEPKKMSVLLRTKNSTIEYDGIMQKSQDNVTELYDVSISLSVSFPDVTSNMTIFCILETDKTRLLSSPFSIELEDPQPPPDHIP

SEQ ID NO: 427 - protein, 110 aa, Artificial sequence
  synthetic sequence
  misc_feature (41)..(41): Xaa can be any amino acid other than valine
APLKIQAYFNETADLPCQFANSQNQSLSELVVFWQDQENLXLNEVYLGKEKFDSVHSKYMNRTSFDSDSWTLRLHNLQIKDKGLYQCIIHHKKPTGMIRIHQMNSELSVL

SEQ ID NO: 428 - protein, 224 aa, Artificial sequence
  synthetic sequence
  misc_feature (35)..(35): Xaa can be any amino acid other than glutamine
APLKIQAYFNETADLPCQFANSQNQSLSELVVFWXDQENLVLNEVYLGKEKFDSVHSKYMNRTSFDSDSWTLRLHNLQIKDKGLYQCIIHHKKPTGMIRIHQMNSELSVLANFSQPEIVPISNITENVYINLTCSSIHGYPEPKKMSVLLRTKNSTIEYDGIMQKSQDNVTELYDVSISLSVSFPDVTSNMTIFCILETDKTRLLSSPFSIELEDPQPPPDHIP

SEQ ID NO: 429 - protein, 110 aa, Artificial sequence
  synthetic sequence
  misc_feature (35)..(35): Xaa can be any amino acid other than glutamine
APLKIQAYFNETADLPCQFANSQNQSLSELVVFWXDQENLVLNEVYLGKEKFDSVHSKYMNRTSFDSDSWTLRLHNLQIKDKGLYQCIIHHKKPTGMIRIHQMNSELSVL

SEQ ID NO: 430 - protein, 224 aa, Artificial sequence
  synthetic sequence
  misc_feature (33)..(33): Xaa can be any amino acid other than phenylalanine
APLKIQAYFNETADLPCQFANSQNQSLSELVVXWQDQENLVLNEVYLGKEKFDSVHSKYMNRTSFDSDSWTLRLHNLQIKDKGLYQCIIHHKKPTGMIRIHQMNSELSVLANFSQPEIVPISNITENVYINLTCSSIHGYPEPKKMSVLLRTKNSTIEYDGIMQKSQDNVTELYDVSISLSVSFPDVTSNMTIFCILETDKTRLLSSPFSIELEDPQPPPDHIP

SEQ ID NO: 431 - protein, 110 aa, Artificial sequence
  synthetic sequence
  misc_feature (33)..(33): Xaa can be any amino acid other than phenylalanine
APLKIQAYFNETADLPCQFANSQNQSLSELVVXWQDQENLVLNEVYLGKEKFDSVHSKYMNRTSFDSDSWTLRLHNLQIKDKGLYQCIIHHKKPTGMIRIHQMNSELSVL

SEQ ID NO: 432 - protein, 224 aa, Artificial sequence
  synthetic sequence
  misc_feature (72)..(72): Xaa can be any amino acid other than leucine
APLKIQAYFNETADLPCQFANSQNQSLSELVVFWQDQENLVLNEVYLGKEKFDSVHSKYMNRTSFDSDSWTXRLHNLQIKDKGLYQCIIHHKKPTGMIRIHQMNSELSVLANFSQPEIVPISNITENVYINLTCSSIHGYPEPKKMSVLLRTKNSTIEYDGIMQKSQDNVTELYDVSISLSVSFPDVTSNMTIFCILETDKTRLLSSPFSIELEDPQPPPDHIP

SEQ ID NO: 433 - protein, 110 aa, Artificial sequence
  synthetic sequence
  misc_feature (72)..(72): Xaa can be any amino acid other than leucine
APLKIQAYFNETADLPCQFANSQNQSLSELVVFWQDQENLVLNEVYLGKEKFDSVHSKYMNRTSFDSDSWTXRLHNLQIKDKGLYQCIIHHKKPTGMIRIHQMNSELSVL

SEQ ID NO: 434 - protein, 224 aa, Artificial sequence
  synthetic sequence
  misc_feature (59)..(59): Xaa can be any amino acid other than tyrosine
APLKIQAYFNETADLPCQFANSQNQSLSELVVFWQDQENLVLNEVYLGKEKFDSVHSKXMNRTSFDSDSWTLRLHNLQIKDKGLYQCIIHHKKPTGMIRIHQMNSELSVLANFSQPEIVPISNITENVYINLTCSSIHGYPEPKKMSVLLRTKNSTIEYDGIMQKSQDNVTELYDVSISLSVSFPDVTSNMTIFCILETDKTRLLSSPFSIELEDPQPPPDHIP

SEQ ID NO: 435 - protein, 110 aa, Artificial sequence
  synthetic sequence
  misc_feature (59)..(59): Xaa can be any amino acid other than tyrosine
APLKIQAYFNETADLPCQFANSQNQSLSELVVFWQDQENLVLNEVYLGKEKFDSVHSKXMNRTSFDSDSWTLRLHNLQIKDKGLYQCIIHHKKPTGMIRIHQMNSELSVL

SEQ ID NO: 436 - protein, 224 aa, Artificial sequence
  synthetic sequence
  misc_feature (61)..(61): Xaa can be any amino acid other than asparagine
  misc_feature (91)..(91): Xaa can be any amino acid other than histidine
APLKIQAYFNETADLPCQFANSQNQSLSELVVFWQDQENLVLNEVYLGKEKFDSVHSKYMXRTSFDSDSWTLRLHNLQIKDKGLYQCIIHXKKPTGMIRIHQMNSELSVLANFSQPEIVPISNITENVYINLTCSSIHGYPEPKKMSVLLRTKNSTIEYDGIMQKSQDNVTELYDVSISLSVSFPDVTSNMTIFCILETDKTRLLSSPFSIELEDPQPPPDHIP

SEQ ID NO: 437 - protein, 110 aa, Artificial sequence
  synthetic sequence
  misc_feature (61)..(61): Xaa can be any amino acid other than asparagine
  misc_feature (91)..(91): Xaa can be any amino acid other than histidine
APLKIQAYFNETADLPCQFANSQNQSLSELVVFWQDQENLVLNEVYLGKEKFDSVHSKYMXRTSFDSDSWTLRLHNLQIKDKGLYQCIIHXKKPTGMIRIHQMNSELSVL

SEQ ID NO: 438 - protein, 224 aa, Artificial sequence
  synthetic sequence
  misc_feature (66)..(66): Xaa can be any amino acid other than aspartic acid
  misc_feature (91)..(91): Xaa can be any amino acid other than histidine
APLKIQAYFNETADLPCQFANSQNQSLSELVVFWQDQENLVLNEVYLGKEKFDSVHSKYMNRTSFXSDSWTLRLHNLQIKDKGLYQCIIHXKKPTGMIRIHQMNSELSVLANFSQPEIVPISNITENVYINLTCSSIHGYPEPKKMSVLLRTKNSTIEYDGIMQKSQDNVTELYDVSISLSVSFPDVTSNMTIFCILETDKTRLLSSPFSIELEDPQPPPDHIP

SEQ ID NO: 439 - protein, 110 aa, Artificial sequence
  synthetic sequence
  misc_feature (66)..(66): Xaa can be any amino acid other than asparagine
  misc_feature (91)..(91): Xaa can be any amino acid other than His
APLKIQAYFNETADLPCQFANSQNQSLSELVVFWQDQENLVLNEVYLGKEKFDSVHSKYMNRTSFXSDSWTLRLHNLQIKDKGLYQCIIHXKKPTGMIRIHQMNSELSVL

SEQ ID NO: 440 - protein, 224 aa, Artificial sequence
  synthetic sequence
  misc_feature (61)..(61): Xaa can be any amino acid other than asparagine
  misc_feature (66)..(66): Xaa can be any amino acid other than aspartic acid
  misc_feature (91)..(91): Xaa can be any amino acid other than histidine
APLKIQAYFNETADLPCQFANSQNQSLSELVVFWQDQENLVLNEVYLGKEKFDSVHSKYMXRTSFXSDSWTLRLHNLQIKDKGLYQCIIHXKKPTGMIRIHQMNSELSVLANFSQPEIVPISNITENVYINLTCSSIHGYPEPKKMSVLLRTKNSTIEYDGIMQKSQDNVTELYDVSISLSVSFPDVTSNMTIFCILETDKTRLLSSPFSIELEDPQPPPDHIP

SEQ ID NO: 441 - protein, 110 aa, Artificial sequence
  synthetic sequence
  misc_feature (61)..(61): Xaa can be any amino acid other than asparagine
  misc_feature (66)..(66): Xaa can be any amino acid other than aspartic acid
  misc_feature (91)..(91): Xaa can be any amino acid other than histidine
APLKIQAYFNETADLPCQFANSQNQSLSELVVFWQDQENLVLNEVYLGKEKFDSVHSKYMXRTSFXSDSWTLRLHNLQIKDKGLYQCIIHXKKPTGMIRIHQMNSELSVL

SEQ ID NO: 442 - protein, 174 aa, Artificial sequence
  synthetic sequence
  misc_feature (47)..(47): Xaa can be any amino acid other than lysine
PAGLLDLRQGMFAQLVAQNVLLIDGPLSWYSDPGLAGVSLTGGLSYXEDTKELVVAKAGVYYVFFQLELRRVVAGEGSGSVSLALHLQPLRSAAGAAALALTVDLPPASSEARNSAFGFQGRLLHLSAGQRLGVHLHTEARARHAWQLTQGATVLGLFRVTPEIPAGLPSPRSE

SEQ ID NO: 443 - protein, 174 aa, Artificial sequence
  synthetic sequence
  misc_feature (147)..(147): Xaa can be any amino acid other than glutamine
PAGLLDLRQGMFAQLVAQNVLLIDGPLSWYSDPGLAGVSLTGGLSYKEDTKELVVAKAGVYYVFFQLELRRVVAGEGSGSVSLALHLQPLRSAAGAAALALTVDLPPASSEARNSAFGFQGRLLHLSAGQRLGVHLHTEARARHAWXLTQGATVLGLFRVTPEIPAGLPSPRSE

SEQ ID NO: 444 - protein, 174 aa, Artificial sequence
  synthetic sequence
  misc_feature (11)..(11): Xaa can be any amino acid other than methionine
PAGLLDLRQGXFAQLVAQNVLLIDGPLSWYSDPGLAGVSLTGGLSYKEDTKELVVAKAGVYYVFFQLELRRVVAGEGSGSVSLALHLQPLRSAAGAAALALTVDLPPASSEARNSAFGFQGRLLHLSAGQRLGVHLHTEARARHAWQLTQGATVLGLFRVTPEIPAGLPSPRSE

SEQ ID NO: 445 - protein, 174 aa, Artificial sequence
  synthetic sequence
  misc_feature (12)..(12): Xaa can be any amino acid other than phenylalanine
PAGLLDLRQGMXAQLVAQNVLLIDGPLSWYSDPGLAGVSLTGGLSYKEDTKELVVAKAGVYYVFFQLELRRVVAGEGSGSVSLALHLQPLRSAAGAAALALTVDLPPASSEARNSAFGFQGRLLHLSAGQRLGVHLHTEARARHAWQLTQGATVLGLFRVTPEIPAGLPSPRSE

SEQ ID NO: 446 - protein, 174 aa, Artificial sequence
  synthetic sequence
  misc_feature (14)..(14): Xaa can be any amino acid other than glutamine
PAGLLDLRQGMFAXLVAQNVLLIDGPLSWYSDPGLAGVSLTGGLSYKEDTKELVVAKAGVYYVFFQLELRRVVAGEGSGSVSLALHLQPLRSAAGAAALALTVDLPPASSEARNSAFGFQGRLLHLSAGQRLGVHLHTEARARHAWQLTQGATVLGLFRVTPEIPAGLPSPRSE

SEQ ID NO: 447 - protein, 174 aa, Artificial sequence
  synthetic sequence
  misc_feature (15)..(15): Xaa can be any amino acid other than leucine
PAGLLDLRQGMFAQXVAQNVLLIDGPLSWYSDPGLAGVSLTGGLSYKEDTKELVVAKAGVYYVFFQLELRRVVAGEGSGSVSLALHLQPLRSAAGAAALALTVDLPPASSEARNSAFGFQGRLLHLSAGQRLGVHLHTEARARHAWQLTQGATVLGLFRVTPEIPAGLPSPRSE

SEQ ID NO: 448 - protein, 174 aa, Artificial sequence
  synthetic sequence
  misc_feature (16)..(16): Xaa can be any amino acid other than valine
PAGLLDLRQGMFAQLXAQNVLLIDGPLSWYSDPGLAGVSLTGGLSYKEDTKELVVAKAGVYYVFFQLELRRVVAGEGSGSVSLALHLQPLRSAAGAAALALTVDLPPASSEARNSAFGFQGRLLHLSAGQRLGVHLHTEARARHAWQLTQGATVLGLFRVTPEIPAGLPSPRSE

SEQ ID NO: 449 - protein, 174 aa, Artificial sequence
  synthetic sequence
  misc_feature (18)..(18): Xaa can be any amino acid other than glutamine
PAGLLDLRQGMFAQLVAXNVLLIDGPLSWYSDPGLAGVSLTGGLSYKEDTKELVVAKAGVYYVFFQLELRRVVAGEGSGSVSLALHLQPLRSAAGAAALALTVDLPPASSEARNSAFGFQGRLLHLSAGQRLGVHLHTEARARHAWQLTQGATVLGLFRVTPEIPAGLPSPRSE

SEQ ID NO: 450 - protein, 174 aa, Artificial sequence
  synthetic sequence
  misc_feature (19)..(19): Xaa can be any amino acid other than asparagine
PAGLLDLRQGMFAQLVAQXVLLIDGPLSWYSDPGLAGVSLTGGLSYKEDTKELVVAKAGVYYVFFQLELRRVVAGEGSGSVSLALHLQPLRSAAGAAALALTVDLPPASSEARNSAFGFQGRLLHLSAGQRLGVHLHTEARARHAWQLTQGATVLGLFRVTPEIPAGLPSPRSE

SEQ ID NO: 451 - protein, 174 aa, Artificial sequence
  synthetic sequence
  misc_feature (20)..(20): Xaa can be any amino acid other than valine
PAGLLDLRQGMFAQLVAQNXLLIDGPLSWYSDPGLAGVSLTGGLSYKEDTKELVVAKAGVYYVFFQLELRRVVAGEGSGSVSLALHLQPLRSAAGAAALALTVDLPPASSEARNSAFGFQGRLLHLSAGQRLGVHLHTEARARHAWQLTQGATVLGLFRVTPEIPAGLPSPRSE

SEQ ID NO: 452 - protein, 174 aa, Artificial sequence
  synthetic sequence
  misc_feature (21)..(21): Xaa can be any amino acid other than leucine
PAGLLDLRQGMFAQLVAQNVXLIDGPLSWYSDPGLAGVSLTGGLSYKEDTKELVVAKAGVYYVFFQLELRRVVAGEGSGSVSLALHLQPLRSAAGAAALALTVDLPPASSEARNSAFGFQGRLLHLSAGQRLGVHLHTEARARHAWQLTQGATVLGLFRVTPEIPAGLPSPRSE

SEQ ID NO: 453 - protein, 174 aa, Artificial sequence
  synthetic sequence
  misc_feature (22)..(22): Xaa can be any amino acid other than leucine
PAGLLDLRQGMFAQLVAQNVLXIDGPLSWYSDPGLAGVSLTGGLSYKEDTKELVVAKAGVYYVFFQLELRRVVAGEGSGSVSLALHLQPLRSAAGAAALALTVDLPPASSEARNSAFGFQGRLLHLSAGQRLGVHLHTEARARHAWQLTQGATVLGLFRVTPEIPAGLPSPRSE

SEQ ID NO: 454 - protein, 174 aa, Artificial sequence
  synthetic sequence
  misc_feature (23)..(23): Xaa can be any amino acid other than isoleucine
PAGLLDLRQGMFAQLVAQNVLLXDGPLSWYSDPGLAGVSLTGGLSYKEDTKELVVAKAGVYYVFFQLELRRVVAGEGSGSVSLALHLQPLRSAAGAAALALTVDLPPASSEARNSAFGFQGRLLHLSAGQRLGVHLHTEARARHAWQLTQGATVLGLFRVTPEIPAGLPSPRSE

SEQ ID NO: 455 - protein, 174 aa, Artificial sequence
  synthetic sequence
  misc_feature (24)..(24): Xaa can be any amino acid other than aspartic acid
PAGLLDLRQGMFAQLVAQNVLLIXGPLSWYSDPGLAGVSLTGGLSYKEDTKELVVAKAGVYYVFFQLELRRVVAGEGSGSVSLALHLQPLRSAAGAAALALTVDLPPASSEARNSAFGFQGRLLHLSAGQRLGVHLHTEARARHAWQLTQGATVLGLFRVTPEIPAGLPSPRSE

SEQ ID NO: 456 - protein, 174 aa, Artificial sequence
  synthetic sequence
  misc_feature (25)..(25): Xaa can be any amino acid other than glycine
PAGLLDLRQGMFAQLVAQNVLLIDXPLSWYSDPGLAGVSLTGGLSYKEDTKELVVAKAGVYYVFFQLELRRVVAGEGSGSVSLALHLQPLRSAAGAAALALTVDLPPASSEARNSAFGFQGRLLHLSAGQRLGVHLHTEARARHAWQLTQGATVLGLFRVTPEIPAGLPSPRSE

SEQ ID NO: 457 - protein, 174 aa, Artificial sequence
  synthetic sequence
  misc_feature (26)..(26): Xaa can be any amino acid other than proline
PAGLLDLRQGMFAQLVAQNVLLIDGXLSWYSDPGLAGVSLTGGLSYKEDTKELVVAKAGVYYVFFQLELRRVVAGEGSGSVSLALHLQPLRSAAGAAALALTVDLPPASSEARNSAFGFQGRLLHLSAGQRLGVHLHTEARARHAWQLTQGATVLGLFRVTPEIPAGLPSPRSE

SEQ ID NO: 458 - protein, 174 aa, Artificial sequence
  synthetic sequence
  misc_feature (27)..(27): Xaa can be any amino acid other than leucine
PAGLLDLRQGMFAQLVAQNVLLIDGPXSWYSDPGLAGVSLTGGLSYKEDTKELVVAKAGVYYVFFQLELRRVVAGEGSGSVSLALHLQPLRSAAGAAALALTVDLPPASSEARNSAFGFQGRLLHLSAGQRLGVHLHTEARARHAWQLTQGATVLGLFRVTPEIPAGLPSPRSE

SEQ ID NO: 459 - protein, 174 aa, Artificial sequence
  synthetic sequence
  misc_feature (28)..(28): Xaa can be any amino acid other than serine
PAGLLDLRQGMFAQLVAQNVLLIDGPLXWYSDPGLAGVSLTGGLSYKEDTKELVVAKAGVYYVFFQLELRRVVAGEGSGSVSLALHLQPLRSAAGAAALALTVDLPPASSEARNSAFGFQGRLLHLSAGQRLGVHLHTEARARHAWQLTQGATVLGLFRVTPEIPAGLPSPRSE

SEQ ID NO: 460 - protein, 174 aa, Artificial sequence
  synthetic sequence
  misc_feature (29)..(29): Xaa can be any amino acid other than tryptophan
PAGLLDLRQGMFAQLVAQNVLLIDGPLSXYSDPGLAGVSLTGGLSYKEDTKELVVAKAGVYYVFFQLELRRVVAGEGSGSVSLALHLQPLRSAAGAAALALTVDLPPASSEARNSAFGFQGRLLHLSAGQRLGVHLHTEARARHAWQLTQGATVLGLFRVTPEIPAGLPSPRSE

SEQ ID NO: 461 - protein, 174 aa, Artificial sequence
  synthetic sequence
  misc_feature (30)..(30): Xaa can be any amino acid other than tyrosine
PAGLLDLRQGMFAQLVAQNVLLIDGPLSWXSDPGLAGVSLTGGLSYKEDTKELVVAKAGVYYVFFQLELRRVVAGEGSGSVSLALHLQPLRSAAGAAALALTVDLPPASSEARNSAFGFQGRLLHLSAGQRLGVHLHTEARARHAWQLTQGATVLGLFRVTPEIPAGLPSPRSE

SEQ ID NO: 462 - protein, 174 aa, Artificial sequence
  synthetic sequence
  misc_feature (31)..(31): Xaa can be any amino acid other than serine
PAGLLDLRQGMFAQLVAQNVLLIDGPLSWYXDPGLAGVSLTGGLSYKEDTKELVVAKAGVYYVFFQLELRRVVAGEGSGSVSLALHLQPLRSAAGAAALALTVDLPPASSEARNSAFGFQGRLLHLSAGQRLGVHLHTEARARHAWQLTQGATVLGLFRVTPEIPAGLPSPRSE

SEQ ID NO: 463 - protein, 174 aa, Artificial sequence
  synthetic sequence
  misc_feature (32)..(32): Xaa can be any amino acid other than aspartic acid
PAGLLDLRQGMFAQLVAQNVLLIDGPLSWYSXPGLAGVSLTGGLSYKEDTKELVVAKAGVYYVFFQLELRRVVAGEGSGSVSLALHLQPLRSAAGAAALALTVDLPPASSEARNSAFGFQGRLLHLSAGQRLGVHLHTEARARHAWQLTQGATVLGLFRVTPEIPAGLPSPRSE

SEQ ID NO: 464 - protein, 174 aa, Artificial sequence
  synthetic sequence
  misc_feature (33)..(33): Xaa can be any amino acid other than proline
PAGLLDLRQGMFAQLVAQNVLLIDGPLSWYSDXGLAGVSLTGGLSYKEDTKELVVAKAGVYYVFFQLELRRVVAGEGSGSVSLALHLQPLRSAAGAAALALTVDLPPASSEARNSAFGFQGRLLHLSAGQRLGVHLHTEARARHAWQLTQGATVLGLFRVTPEIPAGLPSPRSE

SEQ ID NO: 465 - protein, 174 aa, Artificial sequence
  synthetic sequence
  misc_feature (34)..(34): Xaa can be any amino acid other than glycine
PAGLLDLRQGMFAQLVAQNVLLIDGPLSWYSDPXLAGVSLTGGLSYKEDTKELVVAKAGVYYVFFQLELRRVVAGEGSGSVSLALHLQPLRSAAGAAALALTVDLPPASSEARNSAFGFQGRLLHLSAGQRLGVHLHTEARARHAWQLTQGATVLGLFRVTPEIPAGLPSPRSE

SEQ ID NO: 466 - protein, 174 aa, Artificial sequence
  synthetic sequence
  misc_feature (35)..(35): Xaa can be any amino acid other than leucine
PAGLLDLRQGMFAQLVAQNVLLIDGPLSWYSDPGXAGVSLTGGLSYKEDTKELVVAKAGVYYVFFQLELRRVVAGEGSGSVSLALHLQPLRSAAGAAALALTVDLPPASSEARNSAFGFQGRLLHLSAGQRLGVHLHTEARARHAWQLTQGATVLGLFRVTPEIPAGLPSPRSE

SEQ ID NO: 467 - protein, 174 aa, Artificial sequence
  synthetic sequence
  misc_feature (37)..(37): Xaa can be any amino acid other than glycine
PAGLLDLRQGMFAQLVAQNVLLIDGPLSWYSDPGLAXVSLTGGLSYKEDTKELVVAKAGVYYVFFQLELRRVVAGEGSGSVSLALHLQPLRSAAGAAALALTVDLPPASSEARNSAFGFQGRLLHLSAGQRLGVHLHTEARARHAWQLTQGATVLGLFRVTPEIPAGLPSPRSE

SEQ ID NO: 468 - protein, 174 aa, Artificial sequence
  synthetic sequence
  misc_feature (38)..(38): Xaa can be any amino acid other than valine
PAGLLDLRQGMFAQLVAQNVLLIDGPLSWYSDPGLAGXSLTGGLSYKEDTKELVVAKAGVYYVFFQLELRRVVAGEGSGSVSLALHLQPLRSAAGAAALALTVDLPPASSEARNSAFGFQGRLLHLSAGQRLGVHLHTEARARHAWQLTQGATVLGLFRVTPEIPAGLPSPRSE

SEQ ID NO: 469 - protein, 174 aa, Artificial sequence
  synthetic sequence
  misc_feature (39)..(39): Xaa can be any amino acid other than serine
PAGLLDLRQGMFAQLVAQNVLLIDGPLSWYSDPGLAGVXLTGGLSYKEDTKELVVAKAGVYYVFFQLELRRVVAGEGSGSVSLALHLQPLRSAAGAAALALTVDLPPASSEARNSAFGFQGRLLHLSAGQRLGVHLHTEARARHAWQLTQGATVLGLFRVTPEIPAGLPSPRSE

SEQ ID NO: 470 - protein, 174 aa, Artificial sequence
  synthetic sequence
  misc_feature (40)..(40): Xaa can be any amino acid other than leucine
PAGLLDLRQGMFAQLVAQNVLLIDGPLSWYSDPGLAGVSXTGGLSYKEDTKELVVAKAGVYYVFFQLELRRVVAGEGSGSVSLALHLQPLRSAAGAAALALTVDLPPASSEARNSAFGFQGRLLHLSAGQRLGVHLHTEARARHAWQLTQGATVLGLFRVTPEIPAGLPSPRSE

SEQ ID NO: 471 - protein, 174 aa, Artificial sequence
  synthetic sequence
  misc_feature (41)..(41): Xaa can be any amino acid other than threonine
PAGLLDLRQGMFAQLVAQNVLLIDGPLSWYSDPGLAGVSLXGGLSYKEDTKELVVAKAGVYYVFFQLELRRVVAGEGSGSVSLALHLQPLRSAAGAAALALTVDLPPASSEARNSAFGFQGRLLHLSAGQRLGVHLHTEARARHAWQLTQGATVLGLFRVTPEIPAGLPSPRSE

SEQ ID NO: 472 - protein, 174 aa, Artificial sequence
  synthetic sequence
  misc_feature (42)..(42): Xaa can be any amino acid other than glycine
PAGLLDLRQGMFAQLVAQNVLLIDGPLSWYSDPGLAGVSLTXGLSYKEDTKELVVAKAGVYYVFFQLELRRVVAGEGSGSVSLALHLQPLRSAAGAAALALTVDLPPASSEARNSAFGFQGRLLHLSAGQRLGVHLHTEARARHAWQLTQGATVLGLFRVTPEIPAGLPSPRSE

SEQ ID NO: 473 - protein, 174 aa, Artificial sequence
  synthetic sequence
  misc_feature (43)..(43): Xaa can be any amino acid other than glycine
PAGLLDLRQGMFAQLVAQNVLLIDGPLSWYSDPGLAGVSLTGXLSYKEDTKELVVAKAGVYYVFFQLELRRVVAGEGSGSVSLALHLQPLRSAAGAAALALTVDLPPASSEARNSAFGFQGRLLHLSAGQRLGVHLHTEARARHAWQLTQGATVLGLFRVTPEIPAGLPSPRSE

SEQ ID NO: 474 - protein, 174 aa, Artificial sequence
  synthetic sequence
  misc_feature (44)..(44): Xaa can be any amino acid other than leucine
PAGLLDLRQGMFAQLVAQNVLLIDGPLSWYSDPGLAGVSLTGGXSYKEDTKELVVAKAGVYYVFFQLELRRVVAGEGSGSVSLALHLQPLRSAAGAAALALTVDLPPASSEARNSAFGFQGRLLHLSAGQRLGVHLHTEARARHAWQLTQGATVLGLFRVTPEIPAGLPSPRSE

SEQ ID NO: 475 - protein, 174 aa, Artificial sequence
  synthetic sequence
  misc_feature (45)..(45): Xaa can be any amino acid other than serine
PAGLLDLRQGMFAQLVAQNVLLIDGPLSWYSDPGLAGVSLTGGLXYKEDTKELVVAKAGVYYVFFQLELRRVVAGEGSGSVSLALHLQPLRSAAGAAALALTVDLPPASSEARNSAFGFQGRLLHLSAGQRLGVHLHTEARARHAWQLTQGATVLGLFRVTPEIPAGLPSPRSE

SEQ ID NO: 476 - protein, 174 aa, Artificial sequence
  synthetic sequence
  misc_feature (46)..(46): Xaa can be any amino acid other than tyrosine
PAGLLDLRQGMFAQLVAQNVLLIDGPLSWYSDPGLAGVSLTGGLSXKEDTKELVVAKAGVYYVFFQLELRRVVAGEGSGSVSLALHLQPLRSAAGAAALALTVDLPPASSEARNSAFGFQGRLLHLSAGQRLGVHLHTEARARHAWQLTQGATVLGLFRVTPEIPAGLPSPRSE

SEQ ID NO: 477 - protein, 174 aa, Artificial sequence
  synthetic sequence
  misc_feature (48)..(48): Xaa can be any amino acid other than glutamic acid
PAGLLDLRQGMFAQLVAQNVLLIDGPLSWYSDPGLAGVSLTGGLSYKXDTKELVVAKAGVYYVFFQLELRRVVAGEGSGSVSLALHLQPLRSAAGAAALALTVDLPPASSEARNSAFGFQGRLLHLSAGQRLGVHLHTEARARHAWQLTQGATVLGLFRVTPEIPAGLPSPRSE

SEQ ID NO: 478 - protein, 174 aa, Artificial sequence
  synthetic sequence
  misc_feature (49)..(49): Xaa can be any amino acid other than aspartic acid
PAGLLDLRQGMFAQLVAQNVLLIDGPLSWYSDPGLAGVSLTGGLSYKEXTKELVVAKAGVYYVFFQLELRRVVAGEGSGSVSLALHLQPLRSAAGAAALALTVDLPPASSEARNSAFGFQGRLLHLSAGQRLGVHLHTEARARHAWQLTQGATVLGLFRVTPEIPAGLPSPRSE

SEQ ID NO: 479 - protein, 174 aa, Artificial sequence
  synthetic sequence
  misc_feature (50)..(50): Xaa can be any amino acid other than threonine
PAGLLDLRQGMFAQLVAQNVLLIDGPLSWYSDPGLAGVSLTGGLSYKEDXKELVVAKAGVYYVFFQLELRRVVAGEGSGSVSLALHLQPLRSAAGAAALALTVDLPPASSEARNSAFGFQGRLLHLSAGQRLGVHLHTEARARHAWQLTQGATVLGLFRVTPEIPAGLPSPRSE

SEQ ID NO: 480 - protein, 174 aa, Artificial sequence
  synthetic sequence
  misc_feature (51)..(51): Xaa can be any amino acid other than lysine
PAGLLDLRQGMFAQLVAQNVLLIDGPLSWYSDPGLAGVSLTGGLSYKEDTXELVVAKAGVYYVFFQLELRRVVAGEGSGSVSLALHLQPLRSAAGAAALALTVDLPPASSEARNSAFGFQGRLLHLSAGQRLGVHLHTEARARHAWQLTQGATVLGLFRVTPEIPAGLPSPRSE

SEQ ID NO: 481 - protein, 174 aa, Artificial sequence
  synthetic sequence
  misc_feature (52)..(52): Xaa can be any amino acid other than glutamic acid
PAGLLDLRQGMFAQLVAQNVLLIDGPLSWYSDPGLAGVSLTGGLSYKEDTKXLVVAKAGVYYVFFQLELRRVVAGEGSGSVSLALHLQPLRSAAGAAALALTVDLPPASSEARNSAFGFQGRLLHLSAGQRLGVHLHTEARARHAWQLTQGATVLGLFRVTPEIPAGLPSPRSE

SEQ ID NO: 482 - protein, 174 aa, Artificial sequence
  synthetic sequence
  misc_feature (64)..(64): Xaa can be any amino acid other than phenylalanine
PAGLLDLRQGMFAQLVAQNVLLIDGPLSWYSDPGLAGVSLTGGLSYKEDTKELVVAKAGVYYVXFQLELRRVVAGEGSGSVSLALHLQPLRSAAGAAALALTVDLPPASSEARNSAFGFQGRLLHLSAGQRLGVHLHTEARARHAWQLTQGATVLGLFRVTPEIPAGLPSPRSE

SEQ ID NO: 483 - protein, 174 aa, Artificial sequence
  synthetic sequence
  misc_feature (65)..(65): Xaa can be any amino acid other than phenylalanine
PAGLLDLRQGMFAQLVAQNVLLIDGPLSWYSDPGLAGVSLTGGLSYKEDTKELVVAKAGVYYVFXQLELRRVVAGEGSGSVSLALHLQPLRSAAGAAALALTVDLPPASSEARNSAFGFQGRLLHLSAGQRLGVHLHTEARARHAWQLTQGATVLGLFRVTPEIPAGLPSPRSE

SEQ ID NO: 484 - protein, 174 aa, Artificial sequence
  synthetic sequence
  misc_feature (66)..(66): Xaa can be any amino acid other than glutamine
PAGLLDLRQGMFAQLVAQNVLLIDGPLSWYSDPGLAGVSLTGGLSYKEDTKELVVAKAGVYYVFFXLELRRVVAGEGSGSVSLALHLQPLRSAAGAAALALTVDLPPASSEARNSAFGFQGRLLHLSAGQRLGVHLHTEARARHAWQLTQGATVLGLFRVTPEIPAGLPSPRSE

SEQ ID NO: 485 - protein, 174 aa, Artificial sequence
  synthetic sequence
  misc_feature (67)..(67): Xaa can be any amino acid other than leucine
PAGLLDLRQGMFAQLVAQNVLLIDGPLSWYSDPGLAGVSLTGGLSYKEDTKELVVAKAGVYYVFFQXELRRVVAGEGSGSVSLALHLQPLRSAAGAAALALTVDLPPASSEARNSAFGFQGRLLHLSAGQRLGVHLHTEARARHAWQLTQGATVLGLFRVTPEIPAGLPSPRSE

SEQ ID NO: 486 - protein, 174 aa, Artificial sequence
  synthetic sequence
  misc_feature (68)..(68): Xaa can be any amino acid other than glutamic acid
PAGLLDLRQGMFAQLVAQNVLLIDGPLSWYSDPGLAGVSLTGGLSYKEDTKELVVAKAGVYYVFFQLXLRRVVAGEGSGSVSLALHLQPLRSAAGAAALALTVDLPPASSEARNSAFGFQGRLLHLSAGQRLGVHLHTEARARHAWQLTQGATVLGLFRVTPEIPAGLPSPRSE

SEQ ID NO: 487 - protein, 174 aa, Artificial sequence
  synthetic sequence
  misc_feature (69)..(69): Xaa can be any amino acid other than leucine
PAGLLDLRQGMFAQLVAQNVLLIDGPLSWYSDPGLAGVSLTGGLSYKEDTKELVVAKAGVYYVFFQLEXRRVVAGEGSGSVSLALHLQPLRSAAGAAALALTVDLPPASSEARNSAFGFQGRLLHLSAGQRLGVHLHTEARARHAWQLTQGATVLGLFRVTPEIPAGLPSPRSE

SEQ ID NO: 488 - protein, 174 aa, Artificial sequence
  synthetic sequence
  misc_feature (70)..(70): Xaa can be any amino acid other than arginine
PAGLLDLRQGMFAQLVAQNVLLIDGPLSWYSDPGLAGVSLTGGLSYKEDTKELVVAKAGVYYVFFQLELXRVVAGEGSGSVSLALHLQPLRSAAGAAALALTVDLPPASSEARNSAFGFQGRLLHLSAGQRLGVHLHTEARARHAWQLTQGATVLGLFRVTPEIPAGLPSPRSE

SEQ ID NO: 489 - protein, 174 aa, Artificial sequence
  synthetic sequence
  misc_feature (71)..(71): Xaa can be any amino acid other than arginine
PAGLLDLRQGMFAQLVAQNVLLIDGPLSWYSDPGLAGVSLTGGLSYKEDTKELVVAKAGVYYVFFQLELRXVVAGEGSGSVSLALHLQPLRSAAGAAALALTVDLPPASSEARNSAFGFQGRLLHLSAGQRLGVHLHTEARARHAWQLTQGATVLGLFRVTPEIPAGLPSPRSE

SEQ ID NO: 490 - protein, 174 aa, Artificial sequence
  synthetic sequence
  misc_feature (72)..(72): Xaa can be any amino acid other than valine
PAGLLDLRQGMFAQLVAQNVLLIDGPLSWYSDPGLAGVSLTGGLSYKEDTKELVVAKAGVYYVFFQLELRRXVAGEGSGSVSLALHLQPLRSAAGAAALALTVDLPPASSEARNSAFGFQGRLLHLSAGQRLGVHLHTEARARHAWQLTQGATVLGLFRVTPEIPAGLPSPRSE

SEQ ID NO: 491 - protein, 174 aa, Artificial sequence
  synthetic sequence
  misc_feature (73)..(73): Xaa can be any amino acid other than valine
PAGLLDLRQGMFAQLVAQNVLLIDGPLSWYSDPGLAGVSLTGGLSYKEDTKELVVAKAGVYYVFFQLELRRVXAGEGSGSVSLALHLQPLRSAAGAAALALTVDLPPASSEARNSAFGFQGRLLHLSAGQRLGVHLHTEARARHAWQLTQGATVLGLFRVTPEIPAGLPSPRSE

SEQ ID NO: 492 - protein, 174 aa, Artificial sequence
  synthetic sequence
  misc_feature (75)..(75): Xaa can be any amino acid other than glycine
PAGLLDLRQGMFAQLVAQNVLLIDGPLSWYSDPGLAGVSLTGGLSYKEDTKELVVAKAGVYYVFFQLELRRVVAXEGSGSVSLALHLQPLRSAAGAAALALTVDLPPASSEARNSAFGFQGRLLHLSAGQRLGVHLHTEARARHAWQLTQGATVLGLFRVTPEIPAGLPSPRSE

SEQ ID NO: 493 - protein, 174 aa, Artificial sequence
  synthetic sequence
  misc_feature (76)..(76): Xaa can be any amino acid other than glutamic acid
PAGLLDLRQGMFAQLVAQNVLLIDGPLSWYSDPGLAGVSLTGGLSYKEDTKELVVAKAGVYYVFFQLELRRVVAGXGSGSVSLALHLQPLRSAAGAAALALTVDLPPASSEARNSAFGFQGRLLHLSAGQRLGVHLHTEARARHAWQLTQGATVLGLFRVTPEIPAGLPSPRSE

SEQ ID NO: 494 - protein, 174 aa, Artificial sequence
  synthetic sequence
  misc_feature (77)..(77): Xaa can be any amino acid other than glycine
PAGLLDLRQGMFAQLVAQNVLLIDGPLSWYSDPGLAGVSLTGGLSYKEDTKELVVAKAGVYYVFFQLELRRVVAGEXSGSVSLALHLQPLRSAAGAAALALTVDLPPASSEARNSAFGFQGRLLHLSAGQRLGVHLHTEARARHAWQLTQGATVLGLFRVTPEIPAGLPSPRSE

SEQ ID NO: 495 - protein, 174 aa, Artificial sequence
  synthetic sequence
  misc_feature (78)..(78): Xaa can be any amino acid other than serine
PAGLLDLRQGMFAQLVAQNVLLIDGPLSWYSDPGLAGVSLTGGLSYKEDTKELVVAKAGVYYVFFQLELRRVVAGEGXGSVSLALHLQPLRSAAGAAALALTVDLPPASSEARNSAFGFQGRLLHLSAGQRLGVHLHTEARARHAWQLTQGATVLGLFRVTPEIPAGLPSPRSE

SEQ ID NO: 496 - protein, 174 aa, Artificial sequence
  synthetic sequence
  misc_feature (104)..(104): Xaa can be any amino acid other than aspartic acid
PAGLLDLRQGMFAQLVAQNVLLIDGPLSWYSDPGLAGVSLTGGLSYKEDTKELVVAKAGVYYVFFQLELRRVVAGEGSGSVSLALHLQPLRSAAGAAALALTVXLPPASSEARNSAFGFQGRLLHLSAGQRLGVHLHTEARARHAWQLTQGATVLGLFRVTPEIPAGLPSPRSE

SEQ ID NO: 497 - protein, 174 aa, Artificial sequence
  synthetic sequence
  misc_feature (105)..(105): Xaa can be any amino acid other than leucine
PAGLLDLRQGMFAQLVAQNVLLIDGPLSWYSDPGLAGVSLTGGLSYKEDTKELVVAKAGVYYVFFQLELRRVVAGEGSGSVSLALHLQPLRSAAGAAALALTVDXPPASSEARNSAFGFQGRLLHLSAGQRLGVHLHTEARARHAWQLTQGATVLGLFRVTPEIPAGLPSPRSE

SEQ ID NO: 498 - protein, 174 aa, Artificial sequence
  synthetic sequence
  misc_feature (106)..(106): Xaa can be any amino acid other than proline
PAGLLDLRQGMFAQLVAQNVLLIDGPLSWYSDPGLAGVSLTGGLSYKEDTKELVVAKAGVYYVFFQLELRRVVAGEGSGSVSLALHLQPLRSAAGAAALALTVDLXPASSEARNSAFGFQGRLLHLSAGQRLGVHLHTEARARHAWQLTQGATVLGLFRVTPEIPAGLPSPRSE

SEQ ID NO: 499 - protein, 174 aa, Artificial sequence
  synthetic sequence
  misc_feature (109)..(109): Xaa can be any amino acid other than serine
PAGLLDLRQGMFAQLVAQNVLLIDGPLSWYSDPGLAGVSLTGGLSYKEDTKELVVAKAGVYYVFFQLELRRVVAGEGSGSVSLALHLQPLRSAAGAAALALTVDLPPAXSEARNSAFGFQGRLLHLSAGQRLGVHLHTEARARHAWQLTQGATVLGLFRVTPEIPAGLPSPRSE

SEQ ID NO: 500 - protein, 174 aa, Artificial sequence
  synthetic sequence
  misc_feature (110)..(110): Xaa can be any amino acid other than serine
PAGLLDLRQGMFAQLVAQNVLLIDGPLSWYSDPGLAGVSLTGGLSYKEDTKELVVAKAGVYYVFFQLELRRVVAGEGSGSVSLALHLQPLRSAAGAAALALTVDLPPASXEARNSAFGFQGRLLHLSAGQRLGVHLHTEARARHAWQLTQGATVLGLFRVTPEIPAGLPSPRSE

SEQ ID NO: 501 - protein, 174 aa, Artificial sequence
  synthetic sequence
  misc_feature (111)..(111): Xaa can be any amino acid other than glutamic acid
PAGLLDLRQGMFAQLVAQNVLLIDGPLSWYSDPGLAGVSLTGGLSYKEDTKELVVAKAGVYYVFFQLELRRVVAGEGSGSVSLALHLQPLRSAAGAAALALTVDLPPASSXARNSAFGFQGRLLHLSAGQRLGVHLHTEARARHAWQLTQGATVLGLFRVTPEIPAGLPSPRSE

SEQ ID NO: 502 - protein, 174 aa, Artificial sequence
  synthetic sequence
  misc_feature (113)..(113): Xaa can be any amino acid other than arginine
PAGLLDLRQGMFAQLVAQNVLLIDGPLSWYSDPGLAGVSLTGGLSYKEDTKELVVAKAGVYYVFFQLELRRVVAGEGSGSVSLALHLQPLRSAAGAAALALTVDLPPASSEAXNSAFGFQGRLLHLSAGQRLGVHLHTEARARHAWQLTQGATVLGLFRVTPEIPAGLPSPRSE

SEQ ID NO: 503 - protein, 174 aa, Artificial sequence
  synthetic sequence
  misc_feature (114)..(114): Xaa can be any amino acid other than asparagine
PAGLLDLRQGMFAQLVAQNVLLIDGPLSWYSDPGLAGVSLTGGLSYKEDTKELVVAKAGVYYVFFQLELRRVVAGEGSGSVSLALHLQPLRSAAGAAALALTVDLPPASSEARXSAFGFQGRLLHLSAGQRLGVHLHTEARARHAWQLTQGATVLGLFRVTPEIPAGLPSPRSE

SEQ ID NO: 504 - protein, 174 aa, Artificial sequence
  synthetic sequence
  misc_feature (115)..(115): Xaa can be any amino acid other than serine
PAGLLDLRQGMFAQLVAQNVLLIDGPLSWYSDPGLAGVSLTGGLSYKEDTKELVVAKAGVYYVFFQLELRRVVAGEGSGSVSLALHLQPLRSAAGAAALALTVDLPPASSEARNXAFGFQGRLLHLSAGQRLGVHLHTEARARHAWQLTQGATVLGLFRVTPEIPAGLPSPRSE

SEQ ID NO: 505 - protein, 174 aa, Artificial sequence
  synthetic sequence
  misc_feature (117)..(117): Xaa can be any amino acid other than phenylalanine
PAGLLDLRQGMFAQLVAQNVLLIDGPLSWYSDPGLAGVSLTGGLSYKEDTKELVVAKAGVYYVFFQLELRRVVAGEGSGSVSLALHLQPLRSAAGAAALALTVDLPPASSEARNSAXGFQGRLLHLSAGQRLGVHLHTEARARHAWQLTQGATVLGLFRVTPEIPAGLPSPRSE

SEQ ID NO: 506 - protein, 174 aa, Artificial sequence
  synthetic sequence
  misc_feature (130)..(130): Xaa can be any amino acid other than glutamine
PAGLLDLRQGMFAQLVAQNVLLIDGPLSWYSDPGLAGVSLTGGLSYKEDTKELVVAKAGVYYVFFQLELRRVVAGEGSGSVSLALHLQPLRSAAGAAALALTVDLPPASSEARNSAFGFQGRLLHLSAGXRLGVHLHTEARARHAWQLTQGATVLGLFRVTPEIPAGLPSPRSE

SEQ ID NO: 507 - protein, 174 aa, Artificial sequence
  synthetic sequence
  misc_feature (131)..(131): Xaa can be any amino acid other than arginine
PAGLLDLRQGMFAQLVAQNVLLIDGPLSWYSDPGLAGVSLTGGLSYKEDTKELVVAKAGVYYVFFQLELRRVVAGEGSGSVSLALHLQPLRSAAGAAALALTVDLPPASSEARNSAFGFQGRLLHLSAGQXLGVHLHTEARARHAWQLTQGATVLGLFRVTPEIPAGLPSPRSE

SEQ ID NO: 508 - protein, 174 aa, Artificial sequence
  synthetic sequence
  misc_feature (132)..(132): Xaa can be any amino acid other than leucine
PAGLLDLRQGMFAQLVAQNVLLIDGPLSWYSDPGLAGVSLTGGLSYKEDTKELVVAKAGVYYVFFQLELRRVVAGEGSGSVSLALHLQPLRSAAGAAALALTVDLPPASSEARNSAFGFQGRLLHLSAGQRXGVHLHTEARARHAWQLTQGATVLGLFRVTPEIPAGLPSPRSE

SEQ ID NO: 509 - protein, 174 aa, Artificial sequence
  synthetic sequence
  misc_feature (133)..(133): Xaa can be any amino acid other than glycine
PAGLLDLRQGMFAQLVAQNVLLIDGPLSWYSDPGLAGVSLTGGLSYKEDTKELVVAKAGVYYVFFQLELRRVVAGEGSGSVSLALHLQPLRSAAGAAALALTVDLPPASSEARNSAFGFQGRLLHLSAGQRLXVHLHTEARARHAWQLTQGATVLGLFRVTPEIPAGLPSPRSE

SEQ ID NO: 510 - protein, 174 aa, Artificial sequence
  synthetic sequence
  misc_feature (134)..(134): Xaa can be any amino acid other than valine
PAGLLDLRQGMFAQLVAQNVLLIDGPLSWYSDPGLAGVSLTGGLSYKEDTKELVVAKAGVYYVFFQLELRRVVAGEGSGSVSLALHLQPLRSAAGAAALALTVDLPPASSEARNSAFGFQGRLLHLSAGQRLGXHLHTEARARHAWQLTQGATVLGLFRVTPEIPAGLPSPRSE

SEQ ID NO: 511 - protein, 174 aa, Artificial sequence
  synthetic sequence
  misc_feature (135)..(135): Xaa can be any amino acid other than histidine
PAGLLDLRQGMFAQLVAQNVLLIDGPLSWYSDPGLAGVSLTGGLSYKEDTKELVVAKAGVYYVFFQLELRRVVAGEGSGSVSLALHLQPLRSAAGAAALALTVDLPPASSEARNSAFGFQGRLLHLSAGQRLGVXLHTEARARHAWQLTQGATVLGLFRVTPEIPAGLPSPRSE

SEQ ID NO: 512 - protein, 174 aa, Artificial sequence
  synthetic sequence
  misc_feature (136)..(136): Xaa can be any amino acid other than leucine
PAGLLDLRQGMFAQLVAQNVLLIDGPLSWYSDPGLAGVSLTGGLSYKEDTKELVVAKAGVYYVFFQLELRRVVAGEGSGSVSLALHLQPLRSAAGAAALALTVDLPPASSEARNSAFGFQGRLLHLSAGQRLGVHXHTEARARHAWQLTQGATVLGLFRVTPEIPAGLPSPRSE

SEQ ID NO: 513 - protein, 174 aa, Artificial sequence
  synthetic sequence
  misc_feature (137)..(137): Xaa can be any amino acid other than histidine
PAGLLDLRQGMFAQLVAQNVLLIDGPLSWYSDPGLAGVSLTGGLSYKEDTKELVVAKAGVYYVFFQLELRRVVAGEGSGSVSLALHLQPLRSAAGAAALALTVDLPPASSEARNSAFGFQGRLLHLSAGQRLGVHLXTEARARHAWQLTQGATVLGLFRVTPEIPAGLPSPRSE

SEQ ID NO: 514 - protein, 174 aa, Artificial sequence
  synthetic sequence
  misc_feature (138)..(138): Xaa can be any amino acid other than threonine
PAGLLDLRQGMFAQLVAQNVLLIDGPLSWYSDPGLAGVSLTGGLSYKEDTKELVVAKAGVYYVFFQLELRRVVAGEGSGSVSLALHLQPLRSAAGAAALALTVDLPPASSEARNSAFGFQGRLLHLSAGQRLGVHLHXEARARHAWQLTQGATVLGLFRVTPEIPAGLPSPRSE

SEQ ID NO: 515 - protein, 174 aa, Artificial sequence
  synthetic sequence
  misc_feature (139)..(139): Xaa can be any amino acid other than glutamic acid
PAGLLDLRQGMFAQLVAQNVLLIDGPLSWYSDPGLAGVSLTGGLSYKEDTKELVVAKAGVYYVFFQLELRRVVAGEGSGSVSLALHLQPLRSAAGAAALALTVDLPPASSEARNSAFGFQGRLLHLSAGQRLGVHLHTXARARHAWQLTQGATVLGLFRVTPEIPAGLPSPRSE

SEQ ID NO: 516 - protein, 174 aa, Artificial sequence
  synthetic sequence
  misc_feature (141)..(141): Xaa can be any amino acid other than arginine
PAGLLDLRQGMFAQLVAQNVLLIDGPLSWYSDPGLAGVSLTGGLSYKEDTKELVVAKAGVYYVFFQLELRRVVAGEGSGSVSLALHLQPLRSAAGAAALALTVDLPPASSEARNSAFGFQGRLLHLSAGQRLGVHLHTEAXARHAWQLTQGATVLGLFRVTPEIPAGLPSPRSE

SEQ ID NO: 517 - protein, 174 aa, Artificial sequence
  synthetic sequence
  misc_feature (143)..(143): Xaa can be any amino acid other than arginine
PAGLLDLRQGMFAQLVAQNVLLIDGPLSWYSDPGLAGVSLTGGLSYKEDTKELVVAKAGVYYVFFQLELRRVVAGEGSGSVSLALHLQPLRSAAGAAALALTVDLPPASSEARNSAFGFQGRLLHLSAGQRLGVHLHTEARAXHAWQLTQGATVLGLFRVTPEIPAGLPSPRSE

SEQ ID NO: 518 - protein, 174 aa, Artificial sequence
  synthetic sequence
  misc_feature (144)..(144): Xaa can be any amino acid other than histidine
PAGLLDLRQGMFAQLVAQNVLLIDGPLSWYSDPGLAGVSLTGGLSYKEDTKELVVAKAGVYYVFFQLELRRVVAGEGSGSVSLALHLQPLRSAAGAAALALTVDLPPASSEARNSAFGFQGRLLHLSAGQRLGVHLHTEARARXAWQLTQGATVLGLFRVTPEIPAGLPSPRSE

SEQ ID NO: 519 - protein, 174 aa, Artificial sequence
  synthetic sequence
  misc_feature (146)..(146): Xaa can be any amino acid other than tryptophan
PAGLLDLRQGMFAQLVAQNVLLIDGPLSWYSDPGLAGVSLTGGLSYKEDTKELVVAKAGVYYVFFQLELRRVVAGEGSGSVSLALHLQPLRSAAGAAALALTVDLPPASSEARNSAFGFQGRLLHLSAGQRLGVHLHTEARARHAXQLTQGATVLGLFRVTPEIPAGLPSPRSE

SEQ ID NO: 520 - protein, 174 aa, Artificial sequence
  synthetic sequence
  misc_feature (148)..(148): Xaa can be any amino acid other than leucine
PAGLLDLRQGMFAQLVAQNVLLIDGPLSWYSDPGLAGVSLTGGLSYKEDTKELVVAKAGVYYVFFQLELRRVVAGEGSGSVSLALHLQPLRSAAGAAALALTVDLPPASSEARNSAFGFQGRLLHLSAGQRLGVHLHTEARARHAWQXTQGATVLGLFRVTPEIPAGLPSPRSE

SEQ ID NO: 521 - protein, 174 aa, Artificial sequence
  synthetic sequence
  misc_feature (149)..(149): Xaa can be any amino acid other than threonine
PAGLLDLRQGMFAQLVAQNVLLIDGPLSWYSDPGLAGVSLTGGLSYKEDTKELVVAKAGVYYVFFQLELRRVVAGEGSGSVSLALHLQPLRSAAGAAALALTVDLPPASSEARNSAFGFQGRLLHLSAGQRLGVHLHTEARARHAWQLXQGATVLGLFRVTPEIPAGLPSPRSE

SEQ ID NO: 522 - protein, 174 aa, Artificial sequence
  synthetic sequence
  misc_feature (150)..(150): Xaa can be any amino acid other than glutamine
PAGLLDLRQGMFAQLVAQNVLLIDGPLSWYSDPGLAGVSLTGGLSYKEDTKELVVAKAGVYYVFFQLELRRVVAGEGSGSVSLALHLQPLRSAAGAAALALTVDLPPASSEARNSAFGFQGRLLHLSAGQRLGVHLHTEARARHAWQLTXGATVLGLFRVTPEIPAGLPSPRSE

SEQ ID NO: 523 - protein, 174 aa, Artificial sequence
  synthetic sequence
  misc_feature (151)..(151): Xaa can be any amino acid other than glycine
PAGLLDLRQGMFAQLVAQNVLLIDGPLSWYSDPGLAGVSLTGGLSYKEDTKELVVAKAGVYYVFFQLELRRVVAGEGSGSVSLALHLQPLRSAAGAAALALTVDLPPASSEARNSAFGFQGRLLHLSAGQRLGVHLHTEARARHAWQLTQXATVLGLFRVTPEIPAGLPSPRSE

SEQ ID NO: 524 - protein, 174 aa, Artificial sequence
  synthetic sequence
  misc_feature (153)..(153): Xaa can be any amino acid other than threonine
PAGLLDLRQGMFAQLVAQNVLLIDGPLSWYSDPGLAGVSLTGGLSYKEDTKELVVAKAGVYYVFFQLELRRVVAGEGSGSVSLALHLQPLRSAAGAAALALTVDLPPASSEARNSAFGFQGRLLHLSAGQRLGVHLHTEARARHAWQLTQGAXVLGLFRVTPEIPAGLPSPRSE

SEQ ID NO: 525 - protein, 174 aa, Artificial sequence
  synthetic sequence
  misc_feature (154)..(154): Xaa can be any amino acid other than valine
PAGLLDLRQGMFAQLVAQNVLLIDGPLSWYSDPGLAGVSLTGGLSYKEDTKELVVAKAGVYYVFFQLELRRVVAGEGSGSVSLALHLQPLRSAAGAAALALTVDLPPASSEARNSAFGFQGRLLHLSAGQRLGVHLHTEARARHAWQLTQGATXLGLFRVTPEIPAGLPSPRSE

SEQ ID NO: 526 - protein, 8 aa, Artificial sequence
  synthetic sequence
  misc_feature (1)..(8): Xaa can be any naturally occurring amino acid
XXXXXXXX

SEQ ID NO: 527 - protein, 133 aa, Artificial sequence
  synthetic sequence
  misc_feature (42)..(42): Xaa can be any amino acid other than phenylalanine
APTSSSTKKTQLQLEHLLLDLQMILNGINNYKNPKLTRMLTXKFYMPKKATELKHLQCLEEELKPLEEVLNLAQSKNFHLRPRDLISNINVIVLELKGSETTFMCEYADETATIVEFLNRWITFCQSIISTLT

SEQ ID NO: 528 - protein, 133 aa, Artificial sequence
  synthetic sequence
  misc_feature (20)..(20): Xaa can be any amino acid other than aspartic acid
APTSSSTKKTQLQLEHLLLXLQMILNGINNYKNPKLTRMLTFKFYMPKKATELKHLQCLEEELKPLEEVLNLAQSKNFHLRPRDLISNINVIVLELKGSETTFMCEYADETATIVEFLNRWITFCQSIISTLT

SEQ ID NO: 529 - protein, 133 aa, Artificial sequence
  synthetic sequence
  misc_feature (15)..(15): Xaa can be any amino acid other than glutamic acid
APTSSSTKKTQLQLXHLLLDLQMILNGINNYKNPKLTRMLTFKFYMPKKATELKHLQCLEEELKPLEEVLNLAQSKNFHLRPRDLISNINVIVLELKGSETTFMCEYADETATIVEFLNRWITFCQSIISTLT

SEQ ID NO: 530 - protein, 133 aa, Artificial sequence
  synthetic sequence
  misc_feature (16)..(16): Xaa can be any amino acid other than histidine
APTSSSTKKTQLQLEXLLLDLQMILNGINNYKNPKLTRMLTFKFYMPKKATELKHLQCLEEELKPLEEVLNLAQSKNFHLRPRDLISNINVIVLELKGSETTFMCEYADETATIVEFLNRWITFCQSIISTLT

SEQ ID NO: 531 - protein, 133 aa, Artificial sequence; identical to SEQ ID NO: 530
  synthetic sequence
  misc_feature (16)..(16): Xaa can be any amino acid other than histidine

SEQ ID NO: 532 - protein, 133 aa, Artificial sequence
  synthetic sequence
  misc_feature (45)..(45): Xaa can be any amino acid other than tyrosine
APTSSSTKKTQLQLEHLLLDLQMILNGINNYKNPKLTRMLTFKFXMPKKATELKHLQCLEEELKPLEEVLNLAQSKNFHLRPRDLISNINVIVLELKGSETTFMCEYADETATIVEFLNRWITFCQSIISTLT

SEQ ID NO: 533 - protein, 133 aa, Artificial sequence
  synthetic sequence
  misc_feature (126)..(126): Xaa can be any amino acid other than glutamine
APTSSSTKKTQLQLEHLLLDLQMILNGINNYKNPKLTRMLTFKFYMPKKATELKHLQCLEEELKPLEEVLNLAQSKNFHLRPRDLISNINVIVLELKGSETTFMCEYADETATIVEFLNRWITFCXSIISTLT

SEQ ID NO: 534 - protein, 133 aa, Artificial sequence
  synthetic sequence
  misc_feature (16)..(16): Xaa can be any amino acid other than histidine
  misc_feature (42)..(42): Xaa can be any amino acid other than phenylalanine
APTSSSTKKTQLQLEXLLLDLQMILNGINNYKNPKLTRMLTXKFYMPKKATELKHLQCLEEELKPLEEVLNLAQSKNFHLRPRDLISNINVIVLELKGSETTFMCEYADETATIVEFLNRWITFCQSIISTLT

SEQ ID NO: 535 - protein, 133 aa, Artificial sequence
  synthetic sequence
  misc_feature (20)..(20): Xaa can be any amino acid other than aspartic acid
  misc_feature (42)..(42): Xaa can be any amino acid other than phenylalanine
APTSSSTKKTQLQLEHLLLXLQMILNGINNYKNPKLTRMLTXKFYMPKKATELKHLQCLEEELKPLEEVLNLAQSKNFHLRPRDLISNINVIVLELKGSETTFMCEYADETATIVEFLNRWITFCQSIISTLT

SEQ ID NO: 536 - protein, 133 aa, Artificial sequence
  synthetic sequence
  misc_feature (15)..(15): Xaa can be any amino acid other than glutamic acid
  misc_feature (20)..(20): Xaa can be any amino acid other than aspartic acid
  misc_feature (42)..(42): Xaa can be any amino acid other than phenylalanine
APTSSSTKKTQLQLXHLLLXLQMILNGINNYKNPKLTRMLTXKFYMPKKATELKHLQCLEEELKPLEEVLNLAQSKNFHLRPRDLISNINVIVLELKGSETTFMCEYADETATIVEFLNRWITFCQSIISTLT

SEQ ID NO: 537 - protein, 133 aa, Artificial sequence
  synthetic sequence
  misc_feature (16)..(16): Xaa can be any amino acid other than histidine
  misc_feature (20)..(20): Xaa can be any amino acid other than aspartic acid
  misc_feature (42)..(42): Xaa can be any amino acid other than phenylalanine
APTSSSTKKTQLQLEXLLLXLQMILNGINNYKNPKLTRMLTXKFYMPKKATELKHLQCLEEELKPLEEVLNLAQSKNFHLRPRDLISNINVIVLELKGSETTFMCEYADETATIVEFLNRWITFCQSIISTLT

SEQ ID NO: 538 - protein, 133 aa, Artificial sequence
  synthetic sequence
  misc_feature (20)..(20): Xaa can be any amino acid other than aspartic acid
  misc_feature (42)..(42): Xaa can be any amino acid other than phenylalanine
  misc_feature (126)..(126): Xaa can be any amino acid other than glutamine
APTSSSTKKTQLQLEHLLLXLQMILNGINNYKNPKLTRMLTXKFYMPKKATELKHLQCLEEELKPLEEVLNLAQSKNFHLRPRDLISNINVIVLELKGSETTFMCEYADETATIVEFLNRWITFCXSIISTLT

SEQ ID NO: 539 - protein, 133 aa, Artificial sequence
  synthetic sequence
  misc_feature (20)..(20): Xaa can be any amino acid other than aspartic acid
  misc_feature (42)..(42): Xaa can be any amino acid other than phenylalanine
  misc_feature (45)..(45): Xaa can be any amino acid other than tyrosine
APTSSSTKKTQLQLEHLLLXLQMILNGINNYKNPKLTRMLTXKFXMPKKATELKHLQCLEEELKPLEEVLNLAQSKNFHLRPRDLISNINVIVLELKGSETTFMCEYADETATIVEFLNRWITFCQSIISTLT

SEQ ID NO: 540 - protein, 133 aa, Artificial sequence
  synthetic sequence
  misc_feature (16)..(16): Xaa can be any amino acid other than histidine
  misc_feature (20)..(20): Xaa can be any amino acid other than aspartic acid
  misc_feature (42)..(42): Xaa can be any amino acid other than phenylalanine
  misc_feature (45)..(45): Xaa can be any amino acid other than tyrosine
APTSSSTKKTQLQLEXLLLXLQMILNGINNYKNPKLTRMLTXKFXMPKKATELKHLQCLEEELKPLEEVLNLAQSKNFHLRPRDLISNINVIVLELKGSETTFMCEYADETATIVEFLNRWITFCQSIISTLT

SEQ ID NO: 541 - protein, 133 aa, Artificial sequence
  synthetic sequence
  misc_feature (20)..(20): Xaa can be any amino acid other than aspartic acid
  misc_feature (42)..(42): Xaa can be any amino acid other than phenylalanine
  misc_feature (45)..(45): Xaa can be any amino acid other than tyrosine
  misc_feature (126)..(126): Xaa can be any amino acid other than glutamine
APTSSSTKKTQLQLEHLLLXLQMILNGINNYKNPKLTRMLTXKFXMPKKATELKHLQCLEEELKPLEEVLNLAQSKNFHLRPRDLISNINVIVLELKGSETTFMCEYADETATIVEFLNRWITFCXSIISTLT

SEQ ID NO: 542 - protein, 133 aa, Artificial sequence
  synthetic sequence
  misc_feature (16)..(16): Xaa can be any amino acid other than histidine
  misc_feature (20)..(20): Xaa can be any amino acid other than aspartic acid
  misc_feature (42)..(42): Xaa can be any amino acid other than phenylalanine
  misc_feature (45)..(45): Xaa can be any amino acid other than tyrosine
  misc_feature (126)..(126): Xaa can be any amino acid other than glutamine
APTSSSTKKTQLQLEXLLLXLQMILNGINNYKNPKLTRMLTXKFXMPKKATELKHLQCLEEELKPLEEVLNLAQSKNFHLRPRDLISNINVIVLELKGSETTFMCEYADETATIVEFLNRWITFCXSIISTLT

SEQ ID NO: 543 - protein, 133 aa, Artificial sequence
  synthetic sequence
  misc_feature (16)..(16): Xaa can be any amino acid other than histidine
  misc_feature (42)..(42): Xaa can be any amino acid other than phenylalanine
  misc_feature (126)..(126): Xaa can be any amino acid other than glutamine
APTSSSTKKTQLQLEXLLLDLQMILNGINNYKNPKLTRMLTXKFYMPKKATELKHLQCLEEELKPLEEVLNLAQSKNFHLRPRDLISNINVIVLELKGSETTFMCEYADETATIVEFLNRWITFCXSIISTLT

SEQ ID NO: 544 - protein, 9 aa, Artificial sequence
  synthetic sequence
YPYDVPDYA

SEQ ID NO: 545 - protein, 8 aa, Artificial sequence
  synthetic sequence
DYKDDDDK

SEQ ID NO: 546 - protein, 10 aa, Artificial sequence
  synthetic sequence
EQKLISEEDL

SEQ ID NO: 547 - protein, 5 aa, Artificial sequence
  synthetic sequence
HHHHH

SEQ ID NO: 548 - protein, 6 aa, Artificial sequence
  synthetic sequence
HHHHHH

SEQ ID NO: 549 - protein, 10 aa, Artificial sequence
  synthetic sequence
EQKLISEEDL

SEQ ID NO: 550 - protein, 8 aa, Artificial sequence
  synthetic sequence
DYKDDDDK

SEQ ID NO: 551 - protein, 8 aa, Artificial sequence
  synthetic sequence
WSHPQFEK

SEQ ID NO: 552 - protein, 9 aa, Artificial sequence
  synthetic sequence
YPYDVPDYA

SEQ ID NO: 553 - protein, 5 aa, Artificial sequence
  synthetic sequence
RYIRS

SEQ ID NO: 554 - protein, 4 aa, Artificial sequence
  synthetic sequence
FHHT

SEQ ID NO: 555 - protein, 17 aa, Artificial sequence
  synthetic sequence
WEAAAREACCRECCARA

SEQ ID NO: 556 - protein, 8 aa, Artificial sequence
  synthetic sequence
LEVLFQGP

SEQ ID NO: 557 - protein, 7 aa, Artificial sequence
  synthetic sequence
ENLYTQS

SEQ ID NO: 558 - protein, 5 aa, Artificial sequence
  synthetic sequence
DDDDK

SEQ ID NO: 559 - protein, 4 aa, Artificial sequence
  synthetic sequence
LVPR

SEQ ID NO: 560 - protein, 22 aa, Artificial sequence
  synthetic sequence
GSGATNFSLLKQAGDVEENPGP

SEQ ID NO: 561 - protein, 5 aa, Artificial sequence
  synthetic sequence
  MISC_FEATURE (4)..(4): Xaa is any amino acid other than proline
VPGXG

SEQ ID NO: 562 - protein, 10 aa, Artificial sequence
  synthetic sequence
  MISC_FEATURE (6)..(10): The residues are repeated 1 time
GCGGSGGGGS

SEQ ID NO: 563 - protein, 10 aa, Artificial sequence
  synthetic sequence
  MISC_FEATURE (6)..(10): The residues are repeated 2 times
GCGGSGGGGS

SEQ ID NO: 564 - protein, 10 aa, Artificial sequence
  synthetic sequence
  MISC_FEATURE (6)..(10): The residues are repeated 3 times
GCGGSGGGGS

SEQ ID NO: 565 - protein, 10 aa, Artificial sequence
  synthetic sequence
  MISC_FEATURE (6)..(10): The residues are repeated 4 times
GCGGSGGGGS

SEQ ID NO: 566 - protein, 10 aa, Artificial sequence
  synthetic sequence
  MISC_FEATURE (6)..(10): The residues are repeated 5 times
GCGGSGGGGS

SEQ ID NO: 567 - protein, 10 aa, Artificial sequence
  synthetic sequence
  MISC_FEATURE (6)..(10): The residues are repeated 6 times
GCGGSGGGGS

SEQ ID NO: 568 - protein, 10 aa, Artificial sequence
  synthetic sequence
  MISC_FEATURE (6)..(10): The residues are repeated 7 times
GCGGSGGGGS

SEQ ID NO: 569 - protein, 10 aa, Artificial sequence
  synthetic sequence
  MISC_FEATURE (6)..(10): The residues are repeated 8 times
GCGGSGGGGS

SEQ ID NO: 570 - protein, 10 aa, Artificial sequence
  synthetic sequence
  MISC_FEATURE (6)..(10): The residues are repeated 9 times
GCGGSGGGGS

SEQ ID NO: 571 - protein, 10 aa, Artificial sequence
  synthetic sequence
  MISC_FEATURE (6)..(10): The residues are repeated 10 times
GCGGSGGGGS

SEQ ID NO: 572 - protein, 10 aa, Artificial sequence
  synthetic sequence
  MISC_FEATURE (6)..(10): The residues are repeated 1 time
CGGGSGGGGS

SEQ ID NO: 573 - protein, 10 aa, Artificial sequence
  synthetic sequence
  MISC_FEATURE (6)..(10): The residues are repeated 2 times
CGGGSGGGGS

SEQ ID NO: 574 - protein, 10 aa, Artificial sequence
  synthetic sequence
  MISC_FEATURE (6)..(10): The residues are repeated 3 times
CGGGSGGGGS

SEQ ID NO: 575 - protein, 10 aa, Artificial sequence
  synthetic sequence
  MISC_FEATURE (6)..(10): The residues are repeated 4 times
CGGGSGGGGS

SEQ ID NO: 576 - protein, 10 aa, Artificial sequence
  synthetic sequence
  MISC_FEATURE (6)..(10): The residues are repeated 5 times
CGGGSGGGGS

SEQ ID NO: 577 - protein, 10 aa, Artificial sequence
  synthetic sequence
  MISC_FEATURE (6)..(10): The residues are repeated 6 times
CGGGSGGGGS

SEQ ID NO: 578 - protein, 10 aa, Artificial sequence
  synthetic sequence
  MISC_FEATURE (6)..(10): The residues are repeated 7 times
CGGGSGGGGS

SEQ ID NO: 579 - protein, 10 aa, Artificial sequence
  synthetic sequence
  MISC_FEATURE (6)..(10): The residues are repeated 8 times
CGGGSGGGGS

SEQ ID NO: 580 - protein, 10 aa, Artificial sequence
  synthetic sequence
  MISC_FEATURE (6)..(10): The residues are repeated 9 times
CGGGSGGGGS

SEQ ID NO: 581 - protein, 10 aa, Artificial sequence
  synthetic sequence
  MISC_FEATURE (6)..(10): The residues are repeated 10 times
CGGGSGGGGS

SEQ ID NO: 582 - protein, 10 aa, Artificial sequence
  synthetic sequence
  MISC_FEATURE (6)..(10): The residues may be repeated 1, 2, or 3 times
GCGGSGGGGS

SEQ ID NO: 583 - protein, 10 aa, Artificial sequence
  synthetic sequence
  MISC_FEATURE (6)..(10): The residues may be repeated 1, 2, 3, 4, 5, 6, 7, 8, or 9 times
GCGGSGGGGS

SEQ ID NO: 584 - protein, 13 aa, Artificial sequence
  synthetic sequence
GCGGSGGGSGGGS

SEQ ID NO: 585 - protein, 15 aa, Artificial sequence
  synthetic sequence
GCGGSGGGGSGGGGS

SEQ ID NO: 586 - protein, 341 aa, Artificial sequence
  synthetic sequence
  MISC_FEATURE (84)..(84): In some cases, amino acid X1 at position 84 is an Ala. In some cases, amino acid 84 is a Cys.
  MISC_FEATURE (236)..(236): In some cases, amino acid X2 at position 236 is a Cys.
GSHSMRYFSTSVSRPGRGEPRFIAVGYVDDTQFVRFDSDAASQRMEPRAPWIEQEGPEYWDEETGKVKAHSQTDRENLRIALRXYNQSEAGSHTLQMMFGCDVGSDGRFLRGYHQYAYDGKDYIALKEDLRSWTAADMAAQITKRKWEAAHVAEQQRAYLEGTCVDGLRRYLENGKETLQRTDPPKTHMTHHPISDHEATLRCWALGFYPAEITLTWQRDGEDQTQDTELVETRPXGDGTFQKWAAVVVPSGEEQRYTCHVQHEGLPKPLTLRWEPSSQPTVPIVGIIAGLVLLGAVITGAVVAAVMWRRNSSDRKGGSYSQAASSDSAQGSDVSLTACKV

SEQ ID NO: 587 - protein, 5 aa, Artificial sequence
  synthetic sequence
GGCGS

SEQ ID NO: 588 - protein, 5 aa, Artificial sequence
  synthetic sequence
GGGCS

SEQ ID NO: 589 - protein, 10 aa, Artificial sequence
  synthetic sequence
  MISC_FEATURE (6)..(10): The residues may be repeated 1, 2, 3, 4, 5, 6, 7, 8, 9, or 10 times
GGGCSGGGGS

SEQ ID NO: 590 - protein, 5 aa, Artificial sequence
  synthetic sequence
GGGGC

SEQ ID NO: 591 - protein, 10 aa, Artificial sequence
  synthetic sequence
  MISC_FEATURE (6)..(10): The residues may be repeated 1, 2, 3, 4, 5, 6, 7, 8, 9, or 10 times
GGGGCGGGGS

SEQ ID NO: 592 - protein, 10 aa, Artificial sequence
  synthetic sequence
  MISC_FEATURE (6)..(10): The residues may be repeated 1, 2, 3, 4, 5, 6, 7, 8, 9 or 10 times
GGCGSGGGGS

SEQ ID NO: 593 - protein, 945 aa, Artificial sequence
  synthetic sequence
VVGAVGVGKGCGGSGGGGSGGGGSIQRTPKIQVYSCHPAENGKSNFLNCYVSGFHPSDIEVDLLKNGERIEKVEHSDLSFSKDWSFYLLYYTEFTPTEKDEYACRVNHVTLSQPKIVKWDRDMGGGGSGGGGSGGGGSGSHSMRYFYTSVSRPGRGEPRFIAVGYVDDTQFVRFDSDAASQRMEPRAPWIEQEGPEYWDQETRNVKAQSQTDRVDLGTLRGCYNQSEDGSHTIQIMYGCDVGPDGRFLRGYRQDAYDGKDYIALNEDLRSWTAADMAAQITKRKWEAAHAAEQQRAYLEGTCVEWLRRYLENGKETLQRTDPPKTHMTHHPISDHEATLRCWALGFYPAEITLTWQRDGEDQTQDTELVETRPCGDGTFQKWAAVVVPSGEEQRYTCHVQHEGLPKPLTLRWEAAAGGDKTHTCPPCPAPEAAGGPSVFLFPPKPKDTLMISRTPEVTCVVVDVSHEDPEVKFNWYVDGVEVHNAKTKPREEQYNSTYRVVSVLTVLHQDWLNGKEYKCKVSNKALPAPIEKTISKAKGQPREPQVYTLPPSREEMTKNQVSLTCLVKGFYPSDIAVEWESNGQPENNYKTTPPVLDSDGSFFLYSKLTVDKSRWQQGNVFSCSVMHEALHNHYTQKSLSLSPGGGGGSGGGGSGGGGSAPTSSSTKKTQLQLEALLLDLQMILNGINNYKNPKLTRMLTAKFYMPKKATELKHLQCLEEELKPLEEVLNLAQSKNFHLRPRDLISNINVIVLELKGSETTFMCEYADETATIVEFLNRWITFCQSIISTLTGGGGSGGGGSGGGGSGGGGSAPTSSSTKKTQLQLEALLLDLQMILNGINNYKNPKLTRMLTAKFYMPKKATELKHLQCLEEELKPLEEVLNLAQSKNFHLRPRDLISNINVIVLELKGSETTFMCEYADETATIVEFLNRWITFCQSIISTLT

SEQ ID NO: 594 - protein, 966 aa, Artifical sequence; identical to SEQ ID NO: 336
  synthetic sequence

SEQ ID NO: 595 - protein, 945 aa, Artificial sequence; identical to SEQ ID NO: 593
  synthetic sequence

SEQ ID NO: 596 - protein, 946 aa, Artificial sequence
  synthetic sequence
VVVGAVGVGKGGGGSGGGGSGGGGSIQRTPKIQVYSRHPAENGKSNFLNCYVSGFHPSDIEVDLLKNGERIEKVEHSDLSFSKDWSFYLLYYTEFTPTEKDEYACRVNHVTLSQPKIVKWDRDMGGGGSGGGGSGGGGSGSHSMRYFYTSVSRPGRGEPRFIAVGYVDDTQFVRFDSDAASQRMEPRAPWIEQEGPEYWDQETRNVKAQSQTDRVDLGTLRGAYNQSEDGSHTIQIMYGCDVGPDGRFLRGYRQDAYDGKDYIALNEDLRSWTAADMAAQITKRKWEAAHAAEQQRAYLEGTCVEWLRRYLENGKETLQRTDPPKTHMTHHPISDHEATLRCWALGFYPAEITLTWQRDGEDQTQDTELVETRPAGDGTFQKWAAVVVPSGEEQRYTCHVQHEGLPKPLTLRWEAAAGGDKTHTCPPCPAPEAAGGPSVFLFPPKPKDTLMISRTPEVTCVVVDVSHEDPEVKFNWYVDGVEVHNAKTKPREEQYNSTYRVVSVLTVLHQDWLNGKEYKCKVSNKALPAPIEKTISKAKGQPREPQVYTLPPSREEMTKNQVSLTCLVKGFYPSDIAVEWESNGQPENNYKTTPPVLDSDGSFFLYSKLTVDKSRWQQGNVFSCSVMHEALHNHYTQKSLSLSPGGGGGSGGGGSGGGGSAPTSSSTKKTQLQLEALLLDLQMILNGINNYKNPKLTRMLTAKFYMPKKATELKHLQCLEEELKPLEEVLNLAQSKNFHLRPRDLISNINVIVLELKGSETTFMCEYADETATIVEFLNRWITFCQSIISTLTGGGGSGGGGSGGGGSGGGGSAPTSSSTKKTQLQLEALLLDLQMILNGINNYKNPKLTRMLTAKFYMPKKATELKHLQCLEEELKPLEEVLNLAQSKNFHLRPRDLISNINVIVLELKGSETTFMCEYADETATIVEFLNRWITFCQSIISTLT

SEQ ID NO: 597 - protein, 946 aa, Artificial sequence
  synthetic sequence
VVVGAVGVGKGGGGSGGGGSGGGGSIQRTPKIQVYSCHPAENGKSNFLNCYVSGFHPSDIEVDLLKNGERIEKVEHSDLSFSKDWSFYLLYYTEFTPTEKDEYACRVNHVTLSQPKIVKWDRDMGGGGSGGGGSGGGGSGSHSMRYFYTSVSRPGRGEPRFIAVGYVDDTQFVRFDSDAASQRMEPRAPWIEQEGPEYWDQETRNVKAQSQTDRVDLGTLRGAYNQSEDGSHTIQIMYGCDVGPDGRFLRGYRQDAYDGKDYIALNEDLRSWTAADMAAQITKRKWEAAHAAEQQRAYLEGTCVEWLRRYLENGKETLQRTDPPKTHMTHHPISDHEATLRCWALGFYPAEITLTWQRDGEDQTQDTELVETRPCGDGTFQKWAAVVVPSGEEQRYTCHVQHEGLPKPLTLRWEAAAGGDKTHTCPPCPAPEAAGGPSVFLFPPKPKDTLMISRTPEVTCVVVDVSHEDPEVKFNWYVDGVEVHNAKTKPREEQYNSTYRVVSVLTVLHQDWLNGKEYKCKVSNKALPAPIEKTISKAKGQPREPQVYTLPPSREEMTKNQVSLTCLVKGFYPSDIAVEWESNGQPENNYKTTPPVLDSDGSFFLYSKLTVDKSRWQQGNVFSCSVMHEALHNHYTQKSLSLSPGGGGGSGGGGSGGGGSAPTSSSTKKTQLQLEALLLDLQMILNGINNYKNPKLTRMLTAKFYMPKKATELKHLQCLEEELKPLEEVLNLAQSKNFHLRPRDLISNINVIVLELKGSETTFMCEYADETATIVEFLNRWITFCQSIISTLTGGGGSGGGGSGGGGSGGGGSAPTSSSTKKTQLQLEALLLDLQMILNGINNYKNPKLTRMLTAKFYMPKKATELKHLQCLEEELKPLEEVLNLAQSKNFHLRPRDLISNINVIVLELKGSETTFMCEYADETATIVEFLNRWITFCQSIISTLT

SEQ ID NO: 598 - protein, 946 aa, Artificial sequence
  synthetic sequence
VVVGAVGVGKGCGGSGGGGSGGGGSIQRTPKIQVYSRHPAENGKSNFLNCYVSGFHPSDIEVDLLKNGERIEKVEHSDLSFSKDWSFYLLYYTEFTPTEKDEYACRVNHVTLSQPKIVKWDRDMGGGGSGGGGSGGGGSGSHSMRYFYTSVSRPGRGEPRFIAVGYVDDTQFVRFDSDAASQRMEPRAPWIEQEGPEYWDQETRNVKAQSQTDRVDLGTLRGCYNQSEDGSHTIQIMYGCDVGPDGRFLRGYRQDAYDGKDYIALNEDLRSWTAADMAAQITKRKWEAAHAAEQQRAYLEGTCVEWLRRYLENGKETLQRTDPPKTHMTHHPISDHEATLRCWALGFYPAEITLTWQRDGEDQTQDTELVETRPAGDGTFQKWAAVVVPSGEEQRYTCHVQHEGLPKPLTLRWEAAAGGDKTHTCPPCPAPEAAGGPSVFLFPPKPKDTLMISRTPEVTCVVVDVSHEDPEVKFNWYVDGVEVHNAKTKPREEQYNSTYRVVSVLTVLHQDWLNGKEYKCKVSNKALPAPIEKTISKAKGQPREPQVYTLPPSREEMTKNQVSLTCLVKGFYPSDIAVEWESNGQPENNYKTTPPVLDSDGSFFLYSKLTVDKSRWQQGNVFSCSVMHEALHNHYTQKSLSLSPGGGGGSGGGGSGGGGSAPTSSSTKKTQLQLEALLLDLQMILNGINNYKNPKLTRMLTAKFYMPKKATELKHLQCLEEELKPLEEVLNLAQSKNFHLRPRDLISNINVIVLELKGSETTFMCEYADETATIVEFLNRWITFCQSIISTLTGGGGSGGGGSGGGGSGGGGSAPTSSSTKKTQLQLEALLLDLQMILNGINNYKNPKLTRMLTAKFYMPKKATELKHLQCLEEELKPLEEVLNLAQSKNFHLRPRDLISNINVIVLELKGSETTFMCEYADETATIVEFLNRWITFCQSIISTLT

SEQ ID NO: 599 - protein, 645 aa, Artificial sequence
  synthetic sequence
VVVGAVGVGKGCGGSGGGGSGGGGSIQRTPKIQVYSCHPAENGKSNFLNCYVSGFHPSDIEVDLLKNGERIEKVEHSDLSFSKDWSFYLLYYTEFTPTEKDEYACRVNHVTLSQPKIVKWDRDMGGGGSGGGGSGGGGSGSHSMRYFYTSVSRPGRGEPRFIAVGYVDDTQFVRFDSDAASQRMEPRAPWIEQEGPEYWDQETRNVKAQSQTDRVDLGTLRGCYNQSEDGSHTIQIMYGCDVGPDGRFLRGYRQDAYDGKDYIALNEDLRSWTAADMAAQITKRKWEAAHAAEQQRAYLEGTCVEWLRRYLENGKETLQRTDPPKTHMTHHPISDHEATLRCWALGFYPAEITLTWQRDGEDQTQDTELVETRPCGDGTFQKWAAVVVPSGEEQRYTCHVQHEGLPKPLTLRWEAAAGGDKTHTCPPCPAPEAAGGPSVFLFPPKPKDTLMISRTPEVTCVVVDVSHEDPEVKFNWYVDGVEVHNAKTKPREEQYNSTYRVVSVLTVLHQDWLNGKEYKCKVSNKALPAPIEKTISKAKGQPREPQVYTLPPSREEMTKNQVSLTCLVKGFYPSDIAVEWESNGQPENNYKTTPPVLDSDGSFFLYSKLTVDKSRWQQGNVFSCSVMHEALHNHYTQKSLSLSPG

SEQ ID NO: 600 - protein, 645 aa, Artificial sequence
  synthetic sequence
VVVGADGVGKGCGGSGGGGSGGGGSIQRTPKIQVYSCHPAENGKSNFLNCYVSGFHPSDIEVDLLKNGERIEKVEHSDLSFSKDWSFYLLYYTEFTPTEKDEYACRVNHVTLSQPKIVKWDRDMGGGGSGGGGSGGGGSGSHSMRYFYTSVSRPGRGEPRFIAVGYVDDTQFVRFDSDAASQRMEPRAPWIEQEGPEYWDQETRNVKAQSQTDRVDLGTLRGCYNQSEDGSHTIQIMYGCDVGPDGRFLRGYRQDAYDGKDYIALNEDLRSWTAADMAAQITKRKWEAAHAAEQQRAYLEGTCVEWLRRYLENGKETLQRTDPPKTHMTHHPISDHEATLRCWALGFYPAEITLTWQRDGEDQTQDTELVETRPCGDGTFQKWAAVVVPSGEEQRYTCHVQHEGLPKPLTLRWEAAAGGDKTHTCPPCPAPEAAGGPSVFLFPPKPKDTLMISRTPEVTCVVVDVSHEDPEVKFNWYVDGVEVHNAKTKPREEQYNSTYRVVSVLTVLHQDWLNGKEYKCKVSNKALPAPIEKTISKAKGQPREPQVYTLPPSREEMTKNQVSLTCLVKGFYPSDIAVEWESNGQPENNYKTTPPVLDSDGSFFLYSKLTVDKSRWQQGNVFSCSVMHEALHNHYTQKSLSLSPG

SEQ ID NO: 601 - protein, 506 aa, Artificial sequence
  synthetic sequence
GSHSMRYFYTSVSRPGRGEPRFIAVGYVDDTQFVRFDSDAASQRMEPRAPWIEQEGPEYWDQETRNVKAQSQTDRVDLGTLRGCYNQSEDGSHTIQIMYGCDVGPDGRFLRGYRQDAYDGKDYIALNEDLRSWTAADMAAQITKRKWEAAHAAEQQRAYLEGTCVEWLRRYLENGKETLQRTDPPKTHMTHHPISDHEATLRCWALGFYPAEITLTWQRDGEDQTQDTELVETRPCGDGTFQKWAAVVVPSGEEQRYTCHVQHEGLPKPLTLRWEAAAGGDKTHTCPPCPAPEAAGGPSVFLFPPKPKDTLMISRTPEVTCVVVDVSHEDPEVKFNWYVDGVEVHNAKTKPREEQYNSTYRVVSVLTVLHQDWLNGKEYKCKVSNKALPAPIEKTISKAKGQPREPQVYTLPPSREEMTKNQVSLTCLVKGFYPSDIAVEWESNGQPENNYKTTPPVLDSDGSFFLYSKLTVDKSRWQQGNVFSCSVMHEALHNHYTQKSLSLSPG

SEQ ID NO: 602 - protein, 812 aa, Artificial sequence
  synthetic sequence
APTSSSTKKTQLQLEALLLDLQMILNGINNYKNPKLTRMLTAKFYMPKKATELKHLQCLEEELKPLEEVLNLAQSKNFHLRPRDLISNINVIVLELKGSETTFMCEYADETATIVEFLNRWITFCQSIISTLTGGGGSGGGGSGGGGSGGGGSAPTSSSTKKTQLQLEALLLDLQMILNGINNYKNPKLTRMLTAKFYMPKKATELKHLQCLEEELKPLEEVLNLAQSKNFHLRPRDLISNINVIVLELKGSETTFMCEYADETATIVEFLNRWITFCQSIISTLTGGGGSGGGGSGGGGSGGGGSGSHSMRYFYTSVSRPGRGEPRFIAVGYVDDTQFVRFDSDAASQRMEPRAPWIEQEGPEYWDQETRNVKAQSQTDRVDLGTLRGCYNQSEDGSHTIQIMYGCDVGPDGRFLRGYRQDAYDGKDYIALNEDLRSWTAADMAAQITKRKWEAAHAAEQQRAYLEGTCVEWLRRYLENGKETLQRTDPPKTHMTHHPISDHEATLRCWALGFYPAEITLTWQRDGEDQTQDTELVETRPCGDGTFQKWAAVVVPSGEEQRYTCHVQHEGLPKPLTLRWEAAAGGDKTHTCPPCPAPEAAGGPSVFLFPPKPKDTLMISRTPEVTCVVVDVSHEDPEVKFNWYVDGVEVHNAKTKPREEQYNSTYRVVSVLTVLHQDWLNGKEYKCKVSNKALPAPIEKTISKAKGQPREPQVYTLPPSREEMTKNQVSLTCLVKGFYPSDIAVEWESNGQPENNYKTTPPVLDSDGSFFLYSKLTVDKSRWQQGNVFSCSVMHEALHNHYTQKSLSLSPG

What is claimed is:

1. A T-cell modulatory polypeptide (TMP) comprising:
i) a KRAS peptide comprising a KRAS epitope expressed on a cancer cell, wherein the KRAS peptide has a length of at least 4 amino acids;
ii) first major histocompatibility complex (MHC) polypeptide;
iii) a second MHC polypeptide, and
iv) at least one immunomodulatory polypeptide,
wherein the first major histocompatibility complex (MHC) polypeptide is a β2-microglobulin polypeptide; and wherein the second MHC polypeptide is an MHC class I heavy chain polypeptide.

2. A T-cell modulatory polypeptide according to claim 1, further comprising in Ig Fc polypeptide that substantially does not induce cell lysis, optionally an IgG1 Fc polypeptide comprises one or more amino acid substitutions selected from N297A, L234A, L235A, L234F, L235E, and P331S.

3. A T-cell modulatory polypeptide of claim 1 or 2, wherein the β2M polypeptide and the MHC heavy chain polypeptide are joined by a disulfide bond that joins a Cys residue in the β2M polypeptide and a Cys residue in the MHC heavy chain polypeptide, optionally wherein a Cys at amino acid residue 12 of the β2M polypeptide is disulfide bonded to a Cys at amino acid residue 236 of the MHC heavy chain polypeptide.

4. A T-cell modulatory polypeptide of claim 1-3, wherein the β2-microglobulin polypeptide is joined to the KRAS peptide by a first linker comprising a Cys, and wherein a disulfide bond links a Cys present in the first linker with a Cys present in the MHC heavy chain polypeptide, optionally wherein the first linker comprises the sequence CGGGS(GGGGS)n (SEQ ID NO: 142) or GCGGS(GGGGS)n (SEQ ID NO: 140), where n is an integer from 1-10, e.g., 2 or 3, and a disulfide bond links the Cys in the linker with a Cys substituted for Tyr84 of the MHC heavy chain polypeptide.

5. A T-cell modulatory polypeptide of claim 4, wherein the MHC heavy chain polypeptide comprises an amino acid sequence having at least 95% amino acid sequence identity to an HLA-A polypeptide selected from the group consisting of an HLA-A*0201 polypeptide, an HLA-A*1101 polypeptide, an HLA-A*3303 polypeptide, and an HLA-A*2401 polypeptide.

6. A T-cell modulatory polypeptide of any one of claims 1-5, wherein the at least one immunomodulatory polypeptide is a wild-type or variant of an activating immunomodulatory polypeptide selected from the group consisting of a IL-2, a 4-1BBL, CD80, CD86, or combinations thereof, optionally wherein at least one of the at least one immunomodulatory polypeptide is a variant immunomodulatory polypeptide that exhibits reduced affinity to a cognate costimulatory polypeptide compared to the affinity of a corresponding wild-type immunomodulatory polypeptide for the cognate costimulatory polypeptide,

7. A T-cell modulatory polypeptide of claim 6, wherein the at least one immunomodulatory polypeptide is a variant of IL-2 that substantially does not bind to IL-2Rα and has reduced affinity for IL-2RB, optionally wherein the variant IL-2 polypeptide comprises i) an H16A substitution and an F42A substitution; or ii) an H16T substitution and an F42A substitution.

8. A T-cell modulatory polypeptide of any of claims 1-7, wherein the KRAS peptide comprises a sequence selected from the group consisting of:
A) VVGADGVGK (SEQ ID NO:176), VVGACGVGK (SEQ ID NO:177), VVGAVGVGK (SEQ ID NO:178), VVVGADGVGK (SEQ ID NO:179), VVVGAVGVGK (SEQ ID NO:180), VVVGACGVGK (SEQ ID NO:181), VTGADGVGK (SEQ ID NO:182), VTGAVGVGK (SEQ ID NO:183), VTGACGVGK (SEQ ID NO:184), VTVGADGVGK (SEQ ID NO:185), VTVGAVGVGK (SEQ ID NO:186), and VTVGACGVGK (SEQ ID NO:187); and wherein the KRAS peptide has a length of 9 amino acids or 10 amino acids, or a length of at least 9 amino acids or 10 amino acids;
B) VVVGAGDVGK (SEQ ID NO:188); VVGAGDVGK (SEQ ID NO:189); VVVGARGVGK (SEQ ID NO:190); and VVGARGVGK (SEQ ID NO:191); and wherein the KRAS peptide has a length of 9 amino acids or 10 amino acids, or a length of at least 9 amino acids or 10 amino acids;
C) LVVVGADGV (SEQ ID NO:192), LVVVGAVGV (SEQ ID NO:193), LVVVGACGV (SEQ ID NO:194), KLVVVGADGV (SEQ ID NO:195), KLVVVGAVGV (SEQ ID NO:196), KLVVVGACGV (SEQ ID NO:197), LLVVGADGV (SEQ ID NO:198), LLVVGAVGV (SEQ ID NO:199), LLVVGACGV (SEQ ID NO:200), FLVVVGADGV (SEQ ID NO:201), FLVVVGAVGV (SEQ ID NO:202), and FLVVVGACGV (SEQ ID NO:203); and wherein the KRAS peptide has a length of 9 amino acids or 10 amino acids, or a length of at least 9 amino acids or 10 amino acids;
D) KLVVVGAGDV (SEQ ID NO:204); and KLVVVGARGV (SEQ ID NO:205); wherein the KRAS peptide has a length of 9 amino acids or 10 amino acids, or a length of at least 9 amino acids or 10 amino acids;
E) GAGDVGKSAL (SEQ ID NO:206); AGDVGKSAL (SEQ ID NO:207); DVGKSALTI (SEQ ID NO:208); GAVGVGKSAL (SEQ ID NO:209); AVGVGKSAL (SEQ ID NO:210); YKLVVVGAV (SEQ ID NO:211); ARGVGKSAL (SEQ ID NO:212); GARGVGKSAL (SEQ ID NO:213); EYKLVVVGAR (SEQ ID NO:214); RGVGKSALTI (SEQ ID NO:215); LVVVGARGV (SEQ ID NO:216); GADGVGKSAL (SEQ ID NO:217); ACGVGKSAL (SEQ ID NO:218); and GACGVGKSAL (SEQ ID NO:219); wherein the KRAS peptide has a length of 9 amino acids or 10 amino acids, or a length of at least 9 amino acids or 10 amino acids; and
F) VVGAVGVGK (SEQ ID NO:178), VVVGAVGVGK (SEQ ID NO:180), VGAVGVGKS (SEQ ID NO:222), VGAVGVGKSA (SEQ ID NO:223), AVGVGKSAL (SEQ ID NO:210), AVGVGKSALT (SEQ ID NO:225), GAVGVGKSAL (SEQ ID NO:209), GAVGVGKSA (SEQ ID NO:227), LVVVGAVGVG (SEQ ID NO:228), LVVVGAVGV (SEQ ID NO:193), KLVVVGAVGV (SEQ ID NO:196), and KLVVVGAVG (SEQ ID NO:231); where the KRAS peptide has a length of 9 amino acids or 10 amino acids, or a length of at least 9 amino acids or 10 amino acids.

9. A T-cell modulatory polypeptide of any of claims 1-8, wherein:
A) the KRAS peptide is KLVVVGADGV (SEQ ID NO:195) and the MHC heavy chain polypeptide comprises an amino acid sequence having at least 95% amino acid sequence identity to an HLA-A*0201 polypeptide; or
B) the KRAS peptide is VVVGADGVGK (SEQ ID NO:179) or VVGAVGVGK (SEQ ID NO:178), and the MHC heavy chain polypeptide comprises an amino acid sequence having at least 95% amino acid sequence identity to an HLA-A11*01 polypeptide.

10. A T-cell modulatory polypeptide of any one of claims 1-9, wherein the TMP comprises a heterodimer, and wherein the heterodimer comprises:
a1) the first polypeptide comprises, in order from N-terminus to C-terminus:
i) the KRAS peptide; and
ii) a β2-microglobulin polypeptide; and
b1) the second polypeptide comprises, in order from N-terminus to C-terminus:
i) at least one immunomodulatory polypeptide;
ii) an MHC class I heavy chain polypeptide; and
iii) an Ig Fc polypeptide; or
a3) the first polypeptide comprises, in order from N-terminus to C-terminus:
i) the KRAS peptide; and
ii) a β2-microglobulin polypeptide; and
b3) the second polypeptide comprises, in order from N-terminus to C-terminus:
i) an MHC class I heavy chain polypeptide; and
ii) an Ig Fc polypeptide; and
iii) at least one immunomodulatory polypeptide; and
wherein the Ig Fc polypeptide is a human IgG1 Fc polypeptide that substantially does not induce cell lysis, optionally comprising the amino acid sequence of FIG. 3G,

11. A heterodimeric T-cell modulatory polypeptide of claim 10, wherein the β2-microglobulin polypeptide is joined to the KRAS peptide by a first linker that comprises the sequence CGGGS(GGGGS)n (SEQ ID NO: 142) or GCGGS(GGGGS)n (SEQ ID NO: 140), where n is an integer from 1-10, e.g., 2 or 3,
wherein the MHC heavy chain polypeptide comprises a Cys at residue 84 and a Cys at residue 236,
wherein the β2M polypeptide comprises a Cys at residue 12,
wherein the Cys at amino acid residue 12 of the β2M polypeptide is disulfide bonded to a Cys at amino acid residue 236 of the MHC heavy chain polypeptide,
wherein a disulfide bond links the Cys in the linker with a Cys substituted for Tyr84 of the MHC heavy chain polypeptide,
wherein the MHC heavy chain polypeptide comprises an amino acid sequence having at least 95% amino acid sequence identity to an HLA-A polypeptide selected from the group consisting of an HLA-A*0201 polypeptide, an HLA-A*1101 polypeptide, an HLA-A*3303 polypeptide, and an HLA-A*2401 polypeptide,
wherein the at least one immunomodulatory polypeptide is a variant of IL-2 that comprises i) an H16A substitution and an F42A substitution; or ii) an H16T substitution and an F42A substitution, and
wherein the polypeptide comprises two immunomodulatory polypeptides that are the same, are in tandem, and comprise a variant of IL-2 that comprises i) an H16A substitution and an F42A substitution; or ii) an H16T substitution and an F42A substitution.

12. A heterodimeric T-cell modulatory polypeptide according to claim 10 or 11, wherein
A) the KRAS peptide is KLVVVGADGV (SEQ ID NO:195) and the MHC heavy chain polypeptide comprises an amino acid sequence having at least 95% amino acid sequence identity to an HLA-A*0201 polypeptide; or
B) the KRAS peptide is VVVGADGVGK (SEQ ID NO:179) or VVGAVGVGK (SEQ ID NO:178), and the MHC heavy chain polypeptide comprises an amino acid sequence having at least 95% amino acid sequence identity to an HLA-A11*01 polypeptide.

13. A T-cell modulatory polypeptide according to any one of claims 1-9, wherein the TMP is a single polypeptide chain comprising:
i) a KRAS peptide comprising a KRAS epitope expressed on a cancer cell, wherein the KRAS peptide has a length of at least 4 amino acids;
ii) a β2-microglobulin polypeptide;
iii) an MHC class I heavy chain polypeptide, and
iv) at least one immunomodulatory polypeptide.

14. A single-chain T-cell modulatory polypeptide of claim 13, comprising in order from N-terminus to C-terminus:
i) a KRAS peptide; ii) a β2M polypeptide; iii) a class I MHC heavy chain polypeptide; iv) an Ig Fc polypeptide; and v) one or more immunomodulatory polypeptides,
wherein the Ig Fc polypeptide is a human IgG1 Fc polypeptide that substantially does not induce cell lysis, optionally comprising the amino acid sequence of FIG. 3G.

15. A single-chain T-cell modulatory polypeptide of claim 14, wherein the β2-microglobulin polypeptide is joined to the KRAS peptide by a first linker that comprises the sequence CGGGS(GGGGS)n (SEQ ID NO: 142) or GCGGS(GGGGS)n (SEQ ID NO: 140), where n is an integer from 1-10, e.g., 2 or 3,
wherein the MHC heavy chain polypeptide comprises a Cys at residue 84 and a Cys at residue 236,
wherein the β2M polypeptide comprises a Cys at residue 12,
wherein the Cys at amino acid residue 12 of the β2M polypeptide is disulfide bonded to a Cys at amino acid residue 236 of the MHC heavy chain polypeptide,
wherein a disulfide bond links the Cys in the linker with a Cys substituted for Tyr84 of the MHC heavy chain polypeptide,
wherein the B2M polypeptide is connected to the MHC heavy chain polypeptide by a (GGGGS)n linker, where n is 1, 2, 3, 4, 5, 6, 7, 8, 9, or 10, e.g., with n=3 or 7,
wherein the MHC heavy chain polypeptide comprises an amino acid sequence having at least 95% amino acid sequence identity to an HLA-A polypeptide selected from the group consisting of an HLA-A*0201 polypeptide, an HLA-A*1101 polypeptide, an HLA-A*3303 polypeptide, and an HLA-A*2401 polypeptide,
wherein the at least one immunomodulatory polypeptide is a variant of IL-2 that comprises i) an H16A substitution and an F42A substitution; or ii) an H16T substitution and an F42A substitution, and
wherein the polypeptide comprises two immunomodulatory polypeptides that are the same, are in tandem, and comprise a variant of IL-2 that comprises i) an H16A substitution and an F42A substitution; or ii) an H16T substitution and an F42A substitution.

16. A single-chain T-cell modulatory polypeptide according to claim 15, wherein
A) the KRAS peptide is KLVVVGADGV (SEQ ID NO:195) and the MHC heavy chain polypeptide comprises an amino acid sequence having at least 95% amino acid sequence identity to an HLA-A*0201 polypeptide; or
B) the KRAS peptide is VVVGADGVGK (SEQ ID NO:179) or VVGAVGVGK (SEQ ID NO:178), and the MHC heavy chain polypeptide comprises an amino acid sequence having at least 95% amino acid sequence identity to an HLA-A11*01 polypeptide.

17. A T-cell modulatory polypeptide, wherein the TMP is a homodimer comprising a first and second heterodimeric TMP of any one of claims 10-12 or a first and second single-chain TMP of any one of claims 13-16, wherein the first and second heterodimers are the same and are covalently bound by one or more disulfide bonds between the Ig Fc polypeptides of the first and second heterodimers.

18. A nucleic acid comprising a nucleotide sequence encoding a first or second polypeptide of a heterodimeric TMP according to any one of claims 10-12, or a single-chain TMP according to any one of claims 13-16.

19. A method of selectively modulating the activity of T cell specific for a KRAS peptide epitope, the method comprising contacting the T cell with a T-cell modulatory polypeptide according to any one of aspects 1-17, wherein said contacting selectively modulates the activity of the epitope-specific T cell.

20. A method of treating a KRAS-associated cancer in a patient having the cancer, the method comprising administering to the patient an effective amount of a pharmaceutical composition comprising a T-cell modulatory polypeptide according to any one of claims 1-17, optionally further comprising co-administering an immune checkpoint inhibitor to the patient, optionally wherein the immune checkpoint inhibitor is an antibody specific for PD-L1, PD-1, or CTLA4.
